United States Patent Application Publication US 2023/0041377 A1 - sequence listing, part 3

SEQ ID NO: 31364 - protein, 226 aa, synthetic construct; identical to SEQ ID NO: 29134
  source 1..226: note = Description of Artificial Sequence: Synthetic polypeptide; note = XENP021162 7G8_H0_L0.85_Fab Heavy Chain

SEQ ID NO: 31365 - protein, 121 aa, synthetic construct; identical to SEQ ID NO: 17586
  source 1..121: note = Description of Artificial Sequence: Synthetic polypeptide; note = VH of XENP021162

SEQ ID NO: 31366 - protein, 5 aa, synthetic construct
  source 1..5: note = Description of Artificial Sequence: Synthetic peptide; note = XENP021162 vhCDR1
DAWMD

SEQ ID NO: 31367 - protein, 19 aa, synthetic construct
  source 1..19: note = Description of Artificial Sequence: Synthetic peptide; note = XENP021162 vhCDR2
EIRTKANNHATYYAESVKG

SEQ ID NO: 31368 - protein, 10 aa, synthetic construct
  source 1..10: note = Description of Artificial Sequence: Synthetic peptide; note = XENP021162 vhCDR3
LANWDWYFDV

SEQ ID NO: 31369 - protein, 218 aa, synthetic construct; identical to SEQ ID NO: 20540
  source 1..218: note = Description of Artificial Sequence: Synthetic polypeptide; note = XENP021162 7G8_H0_L0.85_Fab Light Chain

SEQ ID NO: 31370 - protein, 111 aa, synthetic construct; identical to SEQ ID NO: 20541
  source 1..111: note = Description of Artificial Sequence: Synthetic polypeptide; note = VL of XENP021162

SEQ ID NO: 31371 - protein, 15 aa, synthetic construct
  source 1..15: note = Description of Artificial Sequence: Synthetic peptide; note = XENP021162 vlCDR1
KASQSVDYDGDSYMN

SEQ ID NO: 31372 - protein, 7 aa, synthetic construct
  source 1..7: note = Description of Artificial Sequence: Synthetic peptide; note = XENP021162 vlCDR2
AASNLES

SEQ ID NO: 31373 - protein, 9 aa, synthetic construct
  source 1..9: note = Description of Artificial Sequence: Synthetic peptide; note = XENP021162 vlCDR3
QQSEEDPFT

SEQ ID NO: 31374 - protein, 226 aa, synthetic construct; identical to SEQ ID NO: 29134
  source 1..226: note = Description of Artificial Sequence: Synthetic polypeptide; note = XENP021163 7G8_H0_L0.86_Fab Heavy Chain

SEQ ID NO: 31375 - protein, 121 aa, synthetic construct; identical to SEQ ID NO: 17586
  source 1..121: note = Description of Artificial Sequence: Synthetic polypeptide; note = VH of XENP021163

SEQ ID NO: 31376 - protein, 5 aa, synthetic construct
  source 1..5: note = Description of Artificial Sequence: Synthetic peptide; note = XENP021163 vhCDR1
DAWMD

SEQ ID NO: 31377 - protein, 19 aa, synthetic construct
  source 1..19: note = Description of Artificial Sequence: Synthetic peptide; note = XENP021163 vhCDR2
EIRTKANNHATYYAESVKG

SEQ ID NO: 31378 - protein, 10 aa, synthetic construct
  source 1..10: note = Description of Artificial Sequence: Synthetic peptide; note = XENP021163 vhCDR3
LANWDWYFDV

SEQ ID NO: 31379 - protein, 218 aa, synthetic construct; identical to SEQ ID NO: 20550
  source 1..218: note = Description of Artificial Sequence: Synthetic polypeptide; note = XENP021163 7G8_H0_L0.86_Fab Light Chain

SEQ ID NO: 31380 - protein, 111 aa, synthetic construct; identical to SEQ ID NO: 20551
  source 1..111: note = Description of Artificial Sequence: Synthetic polypeptide; note = VL of XENP021163

SEQ ID NO: 31381 - protein, 15 aa, synthetic construct
  source 1..15: note = Description of Artificial Sequence: Synthetic peptide; note = XENP021163 vlCDR1
KASQSVDYDGDSYMN

SEQ ID NO: 31382 - protein, 7 aa, synthetic construct
  source 1..7: note = Description of Artificial Sequence: Synthetic peptide; note = XENP021163 vlCDR2
AASNLES

SEQ ID NO: 31383 - protein, 9 aa, synthetic construct
  source 1..9: note = Description of Artificial Sequence: Synthetic peptide; note = XENP021163 vlCDR3
QQSSEDPFT

SEQ ID NO: 31384 - protein, 226 aa, synthetic construct; identical to SEQ ID NO: 29134
  source 1..226: note = Description of Artificial Sequence: Synthetic polypeptide; note = XENP021164 7G8_H0_L0.87_Fab Heavy Chain

SEQ ID NO: 31385 - protein, 121 aa, synthetic construct; identical to SEQ ID NO: 17586
  source 1..121: note = Description of Artificial Sequence: Synthetic polypeptide; note = VH of XENP021164

SEQ ID NO: 31386 - protein, 5 aa, synthetic construct
  source 1..5: note = Description of Artificial Sequence: Synthetic peptide; note = XENP021164 vhCDR1
DAWMD

SEQ ID NO: 31387 - protein, 19 aa, synthetic construct
  source 1..19: note = Description of Artificial Sequence: Synthetic peptide; note = XENP021164 vhCDR2
EIRTKANNHATYYAESVKG

SEQ ID NO: 31388 - protein, 10 aa, synthetic construct
  source 1..10: note = Description of Artificial Sequence: Synthetic peptide; note = XENP021164 vhCDR3
LANWDWYFDV

SEQ ID NO: 31389 - protein, 218 aa, synthetic construct; identical to SEQ ID NO: 20560
  source 1..218: note = Description of Artificial Sequence: Synthetic polypeptide; note = XENP021164 7G8_H0_L0.87_Fab Light Chain

SEQ ID NO: 31390 - protein, 111 aa, synthetic construct; identical to SEQ ID NO: 20561
  source 1..111: note = Description of Artificial Sequence: Synthetic polypeptide; note = VL of XENP021164

SEQ ID NO: 31391 - protein, 15 aa, synthetic construct
  source 1..15: note = Description of Artificial Sequence: Synthetic peptide; note = XENP021164 vlCDR1
KASQSVDYDGDSYMN

SEQ ID NO: 31392 - protein, 7 aa, synthetic construct
  source 1..7: note = Description of Artificial Sequence: Synthetic peptide; note = XENP021164 vlCDR2
AASNLES

SEQ ID NO: 31393 - protein, 9 aa, synthetic construct
  source 1..9: note = Description of Artificial Sequence: Synthetic peptide; note = XENP021164 vlCDR3
QQSREDPFT

SEQ ID NO: 31394 - protein, 226 aa, synthetic construct; identical to SEQ ID NO: 29134
  source 1..226: note = Description of Artificial Sequence: Synthetic polypeptide; note = XENP021165 7G8_H0_L0.88_Fab Heavy Chain

SEQ ID NO: 31395 - protein, 121 aa, synthetic construct; identical to SEQ ID NO: 17586
  source 1..121: note = Description of Artificial Sequence: Synthetic polypeptide; note = VH of XENP021165

SEQ ID NO: 31396 - protein, 5 aa, synthetic construct
  source 1..5: note = Description of Artificial Sequence: Synthetic peptide; note = XENP021165 vhCDR1
DAWMD

SEQ ID NO: 31397 - protein, 19 aa, synthetic construct
  source 1..19: note = Description of Artificial Sequence: Synthetic peptide; note = XENP021165 vhCDR2
EIRTKANNHATYYAESVKG

SEQ ID NO: 31398 - protein, 10 aa, synthetic construct
  source 1..10: note = Description of Artificial Sequence: Synthetic peptide; note = XENP021165 vhCDR3
LANWDWYFDV

SEQ ID NO: 31399 - protein, 218 aa, synthetic construct; identical to SEQ ID NO: 20570
  source 1..218: note = Description of Artificial Sequence: Synthetic polypeptide; note = XENP021165 7G8_H0_L0.88_Fab Light Chain

SEQ ID NO: 31400 - protein, 111 aa, synthetic construct; identical to SEQ ID NO: 20571
  source 1..111: note = Description of Artificial Sequence: Synthetic polypeptide; note = VL of XENP021165

SEQ ID NO: 31401 - protein, 15 aa, synthetic construct
  source 1..15: note = Description of Artificial Sequence: Synthetic peptide; note = XENP021165 vlCDR1
KASQSVDYDGDSYMN

SEQ ID NO: 31402 - protein, 7 aa, synthetic construct
  source 1..7: note = Description of Artificial Sequence: Synthetic peptide; note = XENP021165 vlCDR2
AASNLES

SEQ ID NO: 31403 - protein, 9 aa, synthetic construct
  source 1..9: note = Description of Artificial Sequence: Synthetic peptide; note = XENP021165 vlCDR3
QQSLEDPFT

SEQ ID NO: 31404 - protein, 226 aa, synthetic construct; identical to SEQ ID NO: 29134
  source 1..226: note = Description of Artificial Sequence: Synthetic polypeptide; note = XENP021166 7G8_H0_L0.89_Fab Heavy Chain

SEQ ID NO: 31405 - protein, 121 aa, synthetic construct; identical to SEQ ID NO: 17586
  source 1..121: note = Description of Artificial Sequence: Synthetic polypeptide; note = VH of XENP021166

SEQ ID NO: 31406 - protein, 5 aa, synthetic construct
  source 1..5: note = Description of Artificial Sequence: Synthetic peptide; note = XENP021166 vhCDR1
DAWMD

SEQ ID NO: 31407 - protein, 19 aa, synthetic construct
  source 1..19: note = Description of Artificial Sequence: Synthetic peptide; note = XENP021166 vhCDR2
EIRTKANNHATYYAESVKG

SEQ ID NO: 31408 - protein, 10 aa, synthetic construct
  source 1..10: note = Description of Artificial Sequence: Synthetic peptide; note = XENP021166 vhCDR3
LANWDWYFDV

SEQ ID NO: 31409 - protein, 218 aa, synthetic construct; identical to SEQ ID NO: 20580
  source 1..218: note = Description of Artificial Sequence: Synthetic polypeptide; note = XENP021166 7G8_H0_L0.89_Fab Light Chain

SEQ ID NO: 31410 - protein, 111 aa, synthetic construct; identical to SEQ ID NO: 20581
  source 1..111: note = Description of Artificial Sequence: Synthetic polypeptide; note = VL of XENP021166

SEQ ID NO: 31411 - protein, 15 aa, synthetic construct
  source 1..15: note = Description of Artificial Sequence: Synthetic peptide; note = XENP021166 vlCDR1
KASQSVDYDGDSYMN

SEQ ID NO: 31412 - protein, 7 aa, synthetic construct
  source 1..7: note = Description of Artificial Sequence: Synthetic peptide; note = XENP021166 vlCDR2
AASNLES

SEQ ID NO: 31413 - protein, 9 aa, synthetic construct
  source 1..9: note = Description of Artificial Sequence: Synthetic peptide; note = XENP021166 vlCDR3
QQSTEDPFT

SEQ ID NO: 31414 - protein, 226 aa, synthetic construct; identical to SEQ ID NO: 29134
  source 1..226: note = Description of Artificial Sequence: Synthetic polypeptide; note = XENP021167 7G8_H0_L0.90_Fab Heavy Chain

SEQ ID NO: 31415 - protein, 121 aa, synthetic construct; identical to SEQ ID NO: 17586
  source 1..121: note = Description of Artificial Sequence: Synthetic polypeptide; note = VH of XENP021167

SEQ ID NO: 31416 - protein, 5 aa, synthetic construct
  source 1..5: note = Description of Artificial Sequence: Synthetic peptide; note = XENP021167 vhCDR1
DAWMD

SEQ ID NO: 31417 - protein, 19 aa, synthetic construct
  source 1..19: note = Description of Artificial Sequence: Synthetic peptide; note = XENP021167 vhCDR2
EIRTKANNHATYYAESVKG

SEQ ID NO: 31418 - protein, 10 aa, synthetic construct
  source 1..10: note = Description of Artificial Sequence: Synthetic peptide; note = XENP021167 vhCDR3
LANWDWYFDV

SEQ ID NO: 31419 - protein, 218 aa, synthetic construct; identical to SEQ ID NO: 20590
  source 1..218: note = Description of Artificial Sequence: Synthetic polypeptide; note = XENP021167 7G8_H0_L0.90_Fab Light Chain

SEQ ID NO: 31420 - protein, 111 aa, synthetic construct; identical to SEQ ID NO: 20591
  source 1..111: note = Description of Artificial Sequence: Synthetic polypeptide; note = VL of XENP021167

SEQ ID NO: 31421 - protein, 15 aa, synthetic construct
  source 1..15: note = Description of Artificial Sequence: Synthetic peptide; note = XENP021167 vlCDR1
KASQSVDYDGDSYMN

SEQ ID NO: 31422 - protein, 7 aa, synthetic construct
  source 1..7: note = Description of Artificial Sequence: Synthetic peptide; note = XENP021167 vlCDR2
AASNLES

SEQ ID NO: 31423 - protein, 9 aa, synthetic construct
  source 1..9: note = Description of Artificial Sequence: Synthetic peptide; note = XENP021167 vlCDR3
QQSGEDPFT

SEQ ID NO: 31424 - protein, 226 aa, synthetic construct; identical to SEQ ID NO: 29134
  source 1..226: note = Description of Artificial Sequence: Synthetic polypeptide; note = XENP021168 7G8_H0_L0.91_Fab Heavy Chain

SEQ ID NO: 31425 - protein, 121 aa, synthetic construct; identical to SEQ ID NO: 17586
  source 1..121: note = Description of Artificial Sequence: Synthetic polypeptide; note = VH of XENP021168

SEQ ID NO: 31426 - protein, 5 aa, synthetic construct
  source 1..5: note = Description of Artificial Sequence: Synthetic peptide; note = XENP021168 vhCDR1
DAWMD

SEQ ID NO: 31427 - protein, 19 aa, synthetic construct
  source 1..19: note = Description of Artificial Sequence: Synthetic peptide; note = XENP021168 vhCDR2
EIRTKANNHATYYAESVKG

SEQ ID NO: 31428 - protein, 10 aa, synthetic construct
  source 1..10: note = Description of Artificial Sequence: Synthetic peptide; note = XENP021168 vhCDR3
LANWDWYFDV

SEQ ID NO: 31429 - protein, 218 aa, synthetic construct; identical to SEQ ID NO: 20600
  source 1..218: note = Description of Artificial Sequence: Synthetic polypeptide; note = XENP021168 7G8_H0_L0.91_Fab Light Chain

SEQ ID NO: 31430 - protein, 111 aa, synthetic construct; identical to SEQ ID NO: 20601
  source 1..111: note = Description of Artificial Sequence: Synthetic polypeptide; note = VL of XENP021168

SEQ ID NO: 31431 - protein, 15 aa, synthetic construct
  source 1..15: note = Description of Artificial Sequence: Synthetic peptide; note = XENP021168 vlCDR1
KASQSVDYDGDSYMN

SEQ ID NO: 31432 - protein, 7 aa, synthetic construct
  source 1..7: note = Description of Artificial Sequence: Synthetic peptide; note = XENP021168 vlCDR2
AASNLES

SEQ ID NO: 31433 - protein, 9 aa, synthetic construct
  source 1..9: note = Description of Artificial Sequence: Synthetic peptide; note = XENP021168 vlCDR3
QQSYEDPFT

SEQ ID NO: 31434 - protein, 226 aa, synthetic construct; identical to SEQ ID NO: 29134
  source 1..226: note = Description of Artificial Sequence: Synthetic polypeptide; note = XENP021169 7G8_H0_L0.92_Fab Heavy Chain

SEQ ID NO: 31435 - protein, 121 aa, synthetic construct; identical to SEQ ID NO: 17586
  source 1..121: note = Description of Artificial Sequence: Synthetic polypeptide; note = VH of XENP021169

SEQ ID NO: 31436 - protein, 5 aa, synthetic construct
  source 1..5: note = Description of Artificial Sequence: Synthetic peptide; note = XENP021169 vhCDR1
DAWMD

SEQ ID NO: 31437 - protein, 19 aa, synthetic construct
  source 1..19: note = Description of Artificial Sequence: Synthetic peptide; note = XENP021169 vhCDR2
EIRTKANNHATYYAESVKG

SEQ ID NO: 31438 - protein, 10 aa, synthetic construct
  source 1..10: note = Description of Artificial Sequence: Synthetic peptide; note = XENP021169 vhCDR3
LANWDWYFDV

SEQ ID NO: 31439 - protein, 218 aa, synthetic construct; identical to SEQ ID NO: 20610
  source 1..218: note = Description of Artificial Sequence: Synthetic polypeptide; note = XENP021169 7G8_H0_L0.92_Fab Light Chain

SEQ ID NO: 31440 - protein, 111 aa, synthetic construct; identical to SEQ ID NO: 20611
  source 1..111: note = Description of Artificial Sequence: Synthetic polypeptide; note = VL of XENP021169

SEQ ID NO: 31441 - protein, 15 aa, synthetic construct
  source 1..15: note = Description of Artificial Sequence: Synthetic peptide; note = XENP021169 vlCDR1
KASQSVDYDGDSYMN

SEQ ID NO: 31442 - protein, 7 aa, synthetic construct
  source 1..7: note = Description of Artificial Sequence: Synthetic peptide; note = XENP021169 vlCDR2
AASNLES

SEQ ID NO: 31443 - protein, 9 aa, synthetic construct
  source 1..9: note = Description of Artificial Sequence: Synthetic peptide; note = XENP021169 vlCDR3
QQSNQDPFT

SEQ ID NO: 31444 - protein, 226 aa, synthetic construct; identical to SEQ ID NO: 29134
  source 1..226: note = Description of Artificial Sequence: Synthetic polypeptide; note = XENP021170 7G8_H0_L0.93_Fab Heavy Chain

SEQ ID NO: 31445 - protein, 121 aa, synthetic construct; identical to SEQ ID NO: 17586
  source 1..121: note = Description of Artificial Sequence: Synthetic polypeptide; note = VH of XENP021170

SEQ ID NO: 31446 - protein, 5 aa, synthetic construct
  source 1..5: note = Description of Artificial Sequence: Synthetic peptide; note = XENP021170 vhCDR1
DAWMD

SEQ ID NO: 31447 - protein, 19 aa, synthetic construct
  source 1..19: note = Description of Artificial Sequence: Synthetic peptide; note = XENP021170 vhCDR2
EIRTKANNHATYYAESVKG

SEQ ID NO: 31448 - protein, 10 aa, synthetic construct
  source 1..10: note = Description of Artificial Sequence: Synthetic peptide; note = XENP021170 vhCDR3
LANWDWYFDV

SEQ ID NO: 31449 - protein, 218 aa, synthetic construct; identical to SEQ ID NO: 20620
  source 1..218: note = Description of Artificial Sequence: Synthetic polypeptide; note = XENP021170 7G8_H0_L0.93_Fab Light Chain

SEQ ID NO: 31450 - protein, 111 aa, synthetic construct; identical to SEQ ID NO: 20621
  source 1..111: note = Description of Artificial Sequence: Synthetic polypeptide; note = VL of XENP021170

SEQ ID NO: 31451 - protein, 15 aa, synthetic construct
  source 1..15: note = Description of Artificial Sequence: Synthetic peptide; note = XENP021170 vlCDR1
KASQSVDYDGDSYMN

SEQ ID NO: 31452 - protein, 7 aa, synthetic construct
  source 1..7: note = Description of Artificial Sequence: Synthetic peptide; note = XENP021170 vlCDR2
AASNLES

SEQ ID NO: 31453 - protein, 9 aa, synthetic construct
  source 1..9: note = Description of Artificial Sequence: Synthetic peptide; note = XENP021170 vlCDR3
QQSNDDPFT

SEQ ID NO: 31454 - protein, 226 aa, synthetic construct; identical to SEQ ID NO: 29134
  source 1..226: note = Description of Artificial Sequence: Synthetic polypeptide; note = XENP021171 7G8_H0_L0.94_Fab Heavy Chain

SEQ ID NO: 31455 - protein, 121 aa, synthetic construct; identical to SEQ ID NO: 17586
  source 1..121: note = Description of Artificial Sequence: Synthetic polypeptide; note = VH of XENP021171

SEQ ID NO: 31456 - protein, 5 aa, synthetic construct
  source 1..5: note = Description of Artificial Sequence: Synthetic peptide; note = XENP021171 vhCDR1
DAWMD

SEQ ID NO: 31457 - protein, 19 aa, synthetic construct
  source 1..19: note = Description of Artificial Sequence: Synthetic peptide; note = XENP021171 vhCDR2
EIRTKANNHATYYAESVKG

SEQ ID NO: 31458 - protein, 10 aa, synthetic construct
  source 1..10: note = Description of Artificial Sequence: Synthetic peptide; note = XENP021171 vhCDR3
LANWDWYFDV

SEQ ID NO: 31459 - protein, 218 aa, synthetic construct; identical to SEQ ID NO: 20630
  source 1..218: note = Description of Artificial Sequence: Synthetic polypeptide; note = XENP021171 7G8_H0_L0.94_Fab Light Chain

SEQ ID NO: 31460 - protein, 111 aa, synthetic construct; identical to SEQ ID NO: 20631
  source 1..111: note = Description of Artificial Sequence: Synthetic polypeptide; note = VL of XENP021171

SEQ ID NO: 31461 - protein, 15 aa, synthetic construct
  source 1..15: note = Description of Artificial Sequence: Synthetic peptide; note = XENP021171 vlCDR1
KASQSVDYDGDSYMN

SEQ ID NO: 31462 - protein, 7 aa, synthetic construct
  source 1..7: note = Description of Artificial Sequence: Synthetic peptide; note = XENP021171 vlCDR2
AASNLES

SEQ ID NO: 31463 - protein, 9 aa, synthetic construct
  source 1..9: note = Description of Artificial Sequence: Synthetic peptide; note = XENP021171 vlCDR3
QQSNKDPFT

SEQ ID NO: 31464 - protein, 226 aa, synthetic construct; identical to SEQ ID NO: 29134
  source 1..226: note = Description of Artificial Sequence: Synthetic polypeptide; note = XENP021172 7G8_H0_L0.95_Fab Heavy Chain

SEQ ID NO: 31465 - protein, 121 aa, synthetic construct; identical to SEQ ID NO: 17586
  source 1..121: note = Description of Artificial Sequence: Synthetic polypeptide; note = VH of XENP021172

SEQ ID NO: 31466 - protein, 5 aa, synthetic construct
  source 1..5: note = Description of Artificial Sequence: Synthetic peptide; note = XENP021172 vhCDR1
DAWMD

SEQ ID NO: 31467 - protein, 19 aa, synthetic construct
  source 1..19: note = Description of Artificial Sequence: Synthetic peptide; note = XENP021172 vhCDR2
EIRTKANNHATYYAESVKG

SEQ ID NO: 31468 - protein, 10 aa, synthetic construct
  source 1..10: note = Description of Artificial Sequence: Synthetic peptide; note = XENP021172 vhCDR3
LANWDWYFDV

SEQ ID NO: 31469 - protein, 218 aa, synthetic construct; identical to SEQ ID NO: 20640
  source 1..218: note = Description of Artificial Sequence: Synthetic polypeptide; note = XENP021172 7G8_H0_L0.95_Fab Light Chain

SEQ ID NO: 31470 - protein, 111 aa, synthetic construct; identical to SEQ ID NO: 20641
  source 1..111: note = Description of Artificial Sequence: Synthetic polypeptide; note = VL of XENP021172

SEQ ID NO: 31471 - protein, 15 aa, synthetic construct
  source 1..15: note = Description of Artificial Sequence: Synthetic peptide; note = XENP021172 vlCDR1
KASQSVDYDGDSYMN

SEQ ID NO: 31472 - protein, 7 aa, synthetic construct
  source 1..7: note = Description of Artificial Sequence: Synthetic peptide; note = XENP021172 vlCDR2
AASNLES

SEQ ID NO: 31473 - protein, 9 aa, synthetic construct
  source 1..9: note = Description of Artificial Sequence: Synthetic peptide; note = XENP021172 vlCDR3
QQSNSDPFT

SEQ ID NO: 31474 - protein, 226 aa, synthetic construct; identical to SEQ ID NO: 29134
  source 1..226: note = Description of Artificial Sequence: Synthetic polypeptide; note = XENP021173 7G8_H0_L0.96_Fab Heavy Chain

SEQ ID NO: 31475 - protein, 121 aa, synthetic construct; identical to SEQ ID NO: 17586
  source 1..121: note = Description of Artificial Sequence: Synthetic polypeptide; note = VH of XENP021173

SEQ ID NO: 31476 - protein, 5 aa, synthetic construct
  source 1..5: note = Description of Artificial Sequence: Synthetic peptide; note = XENP021173 vhCDR1
DAWMD

SEQ ID NO: 31477 - protein, 19 aa, synthetic construct
  source 1..19: note = Description of Artificial Sequence: Synthetic peptide; note = XENP021173 vhCDR2
EIRTKANNHATYYAESVKG

SEQ ID NO: 31478 - protein, 10 aa, synthetic construct
  source 1..10: note = Description of Artificial Sequence: Synthetic peptide; note = XENP021173 vhCDR3
LANWDWYFDV

SEQ ID NO: 31479 - protein, 218 aa, synthetic construct; identical to SEQ ID NO: 20650
  source 1..218: note = Description of Artificial Sequence: Synthetic polypeptide; note = XENP021173 7G8_H0_L0.96_Fab Light Chain

SEQ ID NO: 31480 - protein, 111 aa, synthetic construct; identical to SEQ ID NO: 20651
  source 1..111: note = Description of Artificial Sequence: Synthetic polypeptide; note = VL of XENP021173

SEQ ID NO: 31481 - protein, 15 aa, synthetic construct
  source 1..15: note = Description of Artificial Sequence: Synthetic peptide; note = XENP021173 vlCDR1
KASQSVDYDGDSYMN

SEQ ID NO: 31482 - protein, 7 aa, synthetic construct
  source 1..7: note = Description of Artificial Sequence: Synthetic peptide; note = XENP021173 vlCDR2
AASNLES

SEQ ID NO: 31483 - protein, 9 aa, synthetic construct
  source 1..9: note = Description of Artificial Sequence: Synthetic peptide; note = XENP021173 vlCDR3
QQSNHDPFT

SEQ ID NO: 31484 - protein, 226 aa, synthetic construct; identical to SEQ ID NO: 29134
  source 1..226: note = Description of Artificial Sequence: Synthetic polypeptide; note = XENP021174 7G8_H0_L0.97_Fab Heavy Chain

SEQ ID NO: 31485 - protein, 121 aa, synthetic construct; identical to SEQ ID NO: 17586
  source 1..121: note = Description of Artificial Sequence: Synthetic polypeptide; note = VH of XENP021174

SEQ ID NO: 31486 - protein, 5 aa, synthetic construct
  source 1..5: note = Description of Artificial Sequence: Synthetic peptide; note = XENP021174 vhCDR1
DAWMD

SEQ ID NO: 31487 - protein, 19 aa, synthetic construct
  source 1..19: note = Description of Artificial Sequence: Synthetic peptide; note = XENP021174 vhCDR2
EIRTKANNHATYYAESVKG

SEQ ID NO: 31488 - protein, 10 aa, synthetic construct
  source 1..10: note = Description of Artificial Sequence: Synthetic peptide; note = XENP021174 vhCDR3
LANWDWYFDV

SEQ ID NO: 31489 - protein, 218 aa, synthetic construct; identical to SEQ ID NO: 20660
  source 1..218: note = Description of Artificial Sequence: Synthetic polypeptide; note = XENP021174 7G8_H0_L0.97_Fab Light Chain

SEQ ID NO: 31490 - protein, 111 aa, synthetic construct; identical to SEQ ID NO: 20661
  source 1..111: note = Description of Artificial Sequence: Synthetic polypeptide; note = VL of XENP021174

SEQ ID NO: 31491 - protein, 15 aa, synthetic construct
  source 1..15: note = Description of Artificial Sequence: Synthetic peptide; note = XENP021174 vlCDR1
KASQSVDYDGDSYMN

SEQ ID NO: 31492 - protein, 7 aa, synthetic construct
  source 1..7: note = Description of Artificial Sequence: Synthetic peptide; note = XENP021174 vlCDR2
AASNLES

SEQ ID NO: 31493 - protein, 9 aa, synthetic construct
  source 1..9: note = Description of Artificial Sequence: Synthetic peptide; note = XENP021174 vlCDR3
QQSNADPFT

SEQ ID NO: 31494 - protein, 226 aa, synthetic construct; identical to SEQ ID NO: 29134
  source 1..226: note = Description of Artificial Sequence: Synthetic polypeptide; note = XENP021175 7G8_H0_L0.98_Fab Heavy Chain

SEQ ID NO: 31495 - protein, 121 aa, synthetic construct; identical to SEQ ID NO: 17586
  source 1..121: note = Description of Artificial Sequence: Synthetic polypeptide; note = VH of XENP021175

SEQ ID NO: 31496 - protein, 5 aa, synthetic construct
  source 1..5: note = Description of Artificial Sequence: Synthetic peptide; note = XENP021175 vhCDR1
DAWMD

SEQ ID NO: 31497 - protein, 19 aa, synthetic construct
  source 1..19: note = Description of Artificial Sequence: Synthetic peptide; note = XENP021175 vhCDR2
EIRTKANNHATYYAESVKG

SEQ ID NO: 31498 - protein, 10 aa, synthetic construct
  source 1..10: note = Description of Artificial Sequence: Synthetic peptide; note = XENP021175 vhCDR3
LANWDWYFDV

SEQ ID NO: 31499 - protein, 218 aa, synthetic construct; identical to SEQ ID NO: 20670
  source 1..218: note = Description of Artificial Sequence: Synthetic polypeptide; note = XENP021175 7G8_H0_L0.98_Fab Light Chain

SEQ ID NO: 31500 - protein, 111 aa, synthetic construct; identical to SEQ ID NO: 20671
  source 1..111: note = Description of Artificial Sequence: Synthetic polypeptide; note = VL of XENP021175

SEQ ID NO: 31501 - protein, 15 aa, synthetic construct
  source 1..15: note = Description of Artificial Sequence: Synthetic peptide; note = XENP021175 vlCDR1
KASQSVDYDGDSYMN

SEQ ID NO: 31502 - protein, 7 aa, synthetic construct
  source 1..7: note = Description of Artificial Sequence: Synthetic peptide; note = XENP021175 vlCDR2
AASNLES

SEQ ID NO: 31503 - protein, 9 aa, synthetic construct
  source 1..9: note = Description of Artificial Sequence: Synthetic peptide; note = XENP021175 vlCDR3
QQSNGDPFT

SEQ ID NO: 31504 - protein, 226 aa, synthetic construct; identical to SEQ ID NO: 29134
  source 1..226: note = Description of Artificial Sequence: Synthetic polypeptide; note = XENP021176 7G8_H0_L0.99_Fab Heavy Chain

SEQ ID NO: 31505 - protein, 121 aa, synthetic construct; identical to SEQ ID NO: 17586
  source 1..121: note = Description of Artificial Sequence: Synthetic polypeptide; note = VH of XENP021176

SEQ ID NO: 31506 - protein, 5 aa, synthetic construct
  source 1..5: note = Description of Artificial Sequence: Synthetic peptide; note = XENP021176 vhCDR1
DAWMD

SEQ ID NO: 31507 - protein, 19 aa, synthetic construct
  source 1..19: note = Description of Artificial Sequence: Synthetic peptide; note = XENP021176 vhCDR2
EIRTKANNHATYYAESVKG

SEQ ID NO: 31508 - protein, 10 aa, synthetic construct
  source 1..10: note = Description of Artificial Sequence: Synthetic peptide; note = XENP021176 vhCDR3
LANWDWYFDV

SEQ ID NO: 31509 - protein, 218 aa, synthetic construct; identical to SEQ ID NO: 20680
  source 1..218: note = Description of Artificial Sequence: Synthetic polypeptide; note = XENP021176 7G8_H0_L0.99_Fab Light Chain

SEQ ID NO: 31510 - protein, 111 aa, synthetic construct; identical to SEQ ID NO: 20681
  source 1..111: note = Description of Artificial Sequence: Synthetic polypeptide; note = VL of XENP021176

SEQ ID NO: 31511 - protein, 15 aa, synthetic construct
  source 1..15: note = Description of Artificial Sequence: Synthetic peptide; note = XENP021176 vlCDR1
KASQSVDYDGDSYMN

SEQ ID NO: 31512 - protein, 7 aa, synthetic construct
  source 1..7: note = Description of Artificial Sequence: Synthetic peptide; note = XENP021176 vlCDR2
AASNLES

SEQ ID NO: 31513 - protein, 9 aa, synthetic construct
  source 1..9: note = Description of Artificial Sequence: Synthetic peptide; note = XENP021176 vlCDR3
QQSNYDPFT

SEQ ID NO: 31514 - protein, 226 aa, synthetic construct; identical to SEQ ID NO: 29134
  source 1..226: note = Description of Artificial Sequence: Synthetic polypeptide; note = XENP021177 7G8_H0_L0.100_Fab Heavy Chain

SEQ ID NO: 31515 - protein, 121 aa, synthetic construct; identical to SEQ ID NO: 17586
  source 1..121: note = Description of Artificial Sequence: Synthetic polypeptide; note = VH of XENP021177

SEQ ID NO: 31516 - protein, 5 aa, synthetic construct
  source 1..5: note = Description of Artificial Sequence: Synthetic peptide; note = XENP021177 vhCDR1
DAWMD

SEQ ID NO: 31517 - protein, 19 aa, synthetic construct
  source 1..19: note = Description of Artificial Sequence: Synthetic peptide; note = XENP021177 vhCDR2
EIRTKANNHATYYAESVKG

SEQ ID NO: 31518 - protein, 10 aa, synthetic construct
  source 1..10: note = Description of Artificial Sequence: Synthetic peptide; note = XENP021177 vhCDR3
LANWDWYFDV

SEQ ID NO: 31519 - protein, 218 aa, synthetic construct; identical to SEQ ID NO: 20690
  source 1..218: note = Description of Artificial Sequence: Synthetic polypeptide; note = XENP021177 7G8_H0_L0.100_Fab Light Chain

SEQ ID NO: 31520 - protein, 111 aa, synthetic construct; identical to SEQ ID NO: 20691
  source 1..111: note = Description of Artificial Sequence: Synthetic polypeptide; note = VL of XENP021177

SEQ ID NO: 31521 - protein, 15 aa, synthetic construct
  source 1..15: note = Description of Artificial Sequence: Synthetic peptide; note = XENP021177 vlCDR1
KASQSVDYDGDSYMN

SEQ ID NO: 31522 - protein, 7 aa, synthetic construct
  source 1..7: note = Description of Artificial Sequence: Synthetic peptide; note = XENP021177 vlCDR2
AASNLES

SEQ ID NO: 31523 - protein, 9 aa, synthetic construct
  source 1..9: note = Description of Artificial Sequence: Synthetic peptide; note = XENP021177 vlCDR3
QQSNIDPFT

SEQ ID NO: 31524 - protein, 226 aa, synthetic construct; identical to SEQ ID NO: 29134
  source 1..226: note = Description of Artificial Sequence: Synthetic polypeptide; note = XENP021178 7G8_H0_L0.101_Fab Heavy Chain

SEQ ID NO: 31525 - protein, 121 aa, synthetic construct; identical to SEQ ID NO: 17586
  source 1..121: note = Description of Artificial Sequence: Synthetic polypeptide; note = VH of XENP021178

SEQ ID NO: 31526 - protein, 5 aa, synthetic construct
  source 1..5: note = Description of Artificial Sequence: Synthetic peptide; note = XENP021178 vhCDR1
DAWMD

SEQ ID NO: 31527 - protein, 19 aa, synthetic construct
  source 1..19: note = Description of Artificial Sequence: Synthetic peptide; note = XENP021178 vhCDR2
EIRTKANNHATYYAESVKG

SEQ ID NO: 31528 - protein, 10 aa, synthetic construct
  source 1..10: note = Description of Artificial Sequence: Synthetic peptide; note = XENP021178 vhCDR3
LANWDWYFDV

SEQ ID NO: 31529 - protein, 218 aa, synthetic construct; identical to SEQ ID NO: 20700
  source 1..218: note = Description of Artificial Sequence: Synthetic polypeptide; note = XENP021178 7G8_H0_L0.101_Fab Light Chain

SEQ ID NO: 31530 - protein, 111 aa, synthetic construct; identical to SEQ ID NO: 20701
  source 1..111: note = Description of Artificial Sequence: Synthetic polypeptide; note = VL of XENP021178

SEQ ID NO: 31531 - protein, 15 aa, synthetic construct
  source 1..15: note = Description of Artificial Sequence: Synthetic peptide; note = XENP021178 vlCDR1
KASQSVDYDGDSYMN

SEQ ID NO: 31532 - protein, 7 aa, synthetic construct
  source 1..7: note = Description of Artificial Sequence: Synthetic peptide; note = XENP021178 vlCDR2
AASNLES

SEQ ID NO: 31533 - protein, 9 aa, synthetic construct
  source 1..9: note = Description of Artificial Sequence: Synthetic peptide; note = XENP021178 vlCDR3
QQSNENPFT

SEQ ID NO: 31534 - protein, 226 aa, synthetic construct; identical to SEQ ID NO: 29134
  source 1..226: note = Description of Artificial Sequence: Synthetic polypeptide; note = XENP021179 7G8_H0_L0.102_Fab Heavy Chain

SEQ ID NO: 31535 - protein, 121 aa, synthetic construct; identical to SEQ ID NO: 17586
  source 1..121: note = Description of Artificial Sequence: Synthetic polypeptide; note = VH of XENP021179

SEQ ID NO: 31536 - protein, 5 aa, synthetic construct
  source 1..5: note = Description of Artificial Sequence: Synthetic peptide; note = XENP021179 vhCDR1
DAWMD

SEQ ID NO: 31537 - protein, 19 aa, synthetic construct
  source 1..19: note = Description of Artificial Sequence: Synthetic peptide; note = XENP021179 vhCDR2
EIRTKANNHATYYAESVKG

SEQ ID NO: 31538 - protein, 10 aa, synthetic construct
  source 1..10: note = Description of Artificial Sequence: Synthetic peptide; note = XENP021179 vhCDR3
LANWDWYFDV

SEQ ID NO: 31539 - protein, 218 aa, synthetic construct; identical to SEQ ID NO: 20710
  source 1..218: note = Description of Artificial Sequence: Synthetic polypeptide; note = XENP021179 7G8_H0_L0.102_Fab Light Chain

SEQ ID NO: 31540 - protein, 111 aa, synthetic construct; identical to SEQ ID NO: 20711
  source 1..111: note = Description of Artificial Sequence: Synthetic polypeptide; note = VL of XENP021179

SEQ ID NO: 31541 - protein, 15 aa, synthetic construct
  source 1..15: note = Description of Artificial Sequence: Synthetic peptide; note = XENP021179 vlCDR1
KASQSVDYDGDSYMN

SEQ ID NO: 31542 - protein, 7 aa, synthetic construct
  source 1..7: note = Description of Artificial Sequence: Synthetic peptide; note = XENP021179 vlCDR2
AASNLES

SEQ ID NO: 31543 - protein, 9 aa, synthetic construct
  source 1..9: note = Description of Artificial Sequence: Synthetic peptide; note = XENP021179 vlCDR3
QQSNEEPFT

SEQ ID NO: 31544 - protein, 226 aa, synthetic construct; identical to SEQ ID NO: 29134
  source 1..226: note = Description of Artificial Sequence: Synthetic polypeptide; note = XENP021180 7G8_H0_L0.103_Fab Heavy Chain

SEQ ID NO: 31545 - protein, 121 aa, synthetic construct; identical to SEQ ID NO: 17586
  source 1..121: note = Description of Artificial Sequence: Synthetic polypeptide; note = VH of XENP021180

SEQ ID NO: 31546 - protein, 5 aa, synthetic construct
  source 1..5: note = Description of Artificial Sequence: Synthetic peptide; note = XENP021180 vhCDR1
DAWMD

SEQ ID NO: 31547 - protein, 19 aa, synthetic construct
  source 1..19: note = Description of Artificial Sequence: Synthetic peptide; note = XENP021180 vhCDR2
EIRTKANNHATYYAESVKG

SEQ ID NO: 31548 - protein, 10 aa, synthetic construct
  source 1..10: note = Description of Artificial Sequence: Synthetic peptide; note = XENP021180 vhCDR3
LANWDWYFDV

SEQ ID NO: 31549 - protein, 218 aa, synthetic construct; identical to SEQ ID NO: 20720
  source 1..218: note = Description of Artificial Sequence: Synthetic polypeptide; note = XENP021180 7G8_H0_L0.103_Fab Light Chain

SEQ ID NO: 31550 - protein, 111 aa, synthetic construct; identical to SEQ ID NO: 20721
  source 1..111: note = Description of Artificial Sequence: Synthetic polypeptide; note = VL of XENP021180

SEQ ID NO: 31551 - protein, 15 aa, synthetic construct
  source 1..15: note = Description of Artificial Sequence: Synthetic peptide; note = XENP021180 vlCDR1
KASQSVDYDGDSYMN

SEQ ID NO: 31552 - protein, 7 aa, synthetic construct
  source 1..7: note = Description of Artificial Sequence: Synthetic peptide; note = XENP021180 vlCDR2
AASNLES

SEQ ID NO: 31553 - protein, 9 aa, synthetic construct
  source 1..9: note = Description of Artificial Sequence: Synthetic peptide; note = XENP021180 vlCDR3
QQSNEHPFT

SEQ ID NO: 31554 - protein, 226 aa, synthetic construct; identical to SEQ ID NO: 29134
  source 1..226: note = Description of Artificial Sequence: Synthetic polypeptide; note = XENP021181 7G8_H0_L0.104_Fab Heavy Chain

SEQ ID NO: 31555 - protein, 121 aa, synthetic construct; identical to SEQ ID NO: 17586
  source 1..121: note = Description of Artificial Sequence: Synthetic polypeptide; note = VH of XENP021181

SEQ ID NO: 31556 - protein, 5 aa, synthetic construct
  source 1..5: note = Description of Artificial Sequence: Synthetic peptide; note = XENP021181 vhCDR1
DAWMD

SEQ ID NO: 31557 - protein, 19 aa, synthetic construct
  source 1..19: note = Description of Artificial Sequence: Synthetic peptide; note = XENP021181 vhCDR2
EIRTKANNHATYYAESVKG

SEQ ID NO: 31558 - protein, 10 aa, synthetic construct
  source 1..10: note = Description of Artificial Sequence: Synthetic peptide; note = XENP021181 vhCDR3
LANWDWYFDV

SEQ ID NO: 31559 - protein, 218 aa, synthetic construct; identical to SEQ ID NO: 20730
  source 1..218: note = Description of Artificial Sequence: Synthetic polypeptide; note = XENP021181 7G8_H0_L0.104_Fab Light Chain

SEQ ID NO: 31560 - protein, 111 aa, synthetic construct; identical to SEQ ID NO: 20731
  source 1..111: note = Description of Artificial Sequence: Synthetic polypeptide; note = VL of XENP021181

SEQ ID NO: 31561 - protein, 15 aa, synthetic construct
  source 1..15: note = Description of Artificial Sequence: Synthetic peptide; note = XENP021181 vlCDR1
KASQSVDYDGDSYMN

SEQ ID NO: 31562 - protein, 7 aa, synthetic construct
  source 1..7: note = Description of Artificial Sequence: Synthetic peptide; note = XENP021181 vlCDR2
AASNLES

SEQ ID NO: 31563 - protein, 9 aa, synthetic construct
  source 1..9: note = Description of Artificial Sequence: Synthetic peptide; note = XENP021181 vlCDR3
QQSNERPFT

SEQ ID NO: 31564 - protein, 226 aa, synthetic construct; identical to SEQ ID NO: 29134
  source 1..226: note = Description of Artificial Sequence: Synthetic polypeptide; note = XENP021182 7G8_H0_L0.105_Fab Heavy Chain

SEQ ID NO: 31565 - protein, 121 aa, synthetic construct; identical to SEQ ID NO: 17586
  source 1..121: note = Description of Artificial Sequence: Synthetic polypeptide; note = VH of XENP021182

SEQ ID NO: 31566 - protein, 5 aa, synthetic construct
  source 1..5: note = Description of Artificial Sequence: Synthetic peptide; note = XENP021182 vhCDR1
DAWMD

SEQ ID NO: 31567 - protein, 19 aa, synthetic construct
  source 1..19: note = Description of Artificial Sequence: Synthetic peptide; note = XENP021182 vhCDR2
EIRTKANNHATYYAESVKG

SEQ ID NO: 31568 - protein, 10 aa, synthetic construct
  source 1..10: note = Description of Artificial Sequence: Synthetic peptide; note = XENP021182 vhCDR3
LANWDWYFDV

SEQ ID NO: 31569 - protein, 218 aa, synthetic construct; identical to SEQ ID NO: 20740
  source 1..218: note = Description of Artificial Sequence: Synthetic polypeptide; note = XENP021182 7G8_H0_L0.105_Fab Light Chain

SEQ ID NO: 31570 - protein, 111 aa, synthetic construct; identical to SEQ ID NO: 20741
  source 1..111: note = Description of Artificial Sequence: Synthetic polypeptide; note = VL of XENP021182

SEQ ID NO: 31571 - protein, 15 aa, synthetic construct
  source 1..15: note = Description of Artificial Sequence: Synthetic peptide; note = XENP021182 vlCDR1
KASQSVDYDGDSYMN

SEQ ID NO: 31572 - protein, 7 aa, synthetic construct
  source 1..7: note = Description of Artificial Sequence: Synthetic peptide; note = XENP021182 vlCDR2
AASNLES

SEQ ID NO: 31573 - protein, 9 aa, synthetic construct
  source 1..9: note = Description of Artificial Sequence: Synthetic peptide; note = XENP021182 vlCDR3
QQSNELPFT

SEQ ID NO: 31574 - protein, 226 aa, synthetic construct; identical to SEQ ID NO: 29134
  source 1..226: note = Description of Artificial Sequence: Synthetic polypeptide; note = XENP021183 7G8_H0_L0.106_Fab Heavy Chain

SEQ ID NO: 31575 - protein, 121 aa, synthetic construct; identical to SEQ ID NO: 17586
  source 1..121: note = Description of Artificial Sequence: Synthetic polypeptide; note = VH of XENP021183

SEQ ID NO: 31576 - protein, 5 aa, synthetic construct
  source 1..5: note = Description of Artificial Sequence: Synthetic peptide; note = XENP021183 vhCDR1
DAWMD

SEQ ID NO: 31577 - protein, 19 aa, synthetic construct
  source 1..19: note = Description of Artificial Sequence: Synthetic peptide; note = XENP021183 vhCDR2
EIRTKANNHATYYAESVKG

SEQ ID NO: 31578 - protein, 10 aa, synthetic construct
  source 1..10: note = Description of Artificial Sequence: Synthetic peptide; note = XENP021183 vhCDR3
LANWDWYFDV

SEQ ID NO: 31579 - protein, 218 aa, synthetic construct; identical to SEQ ID NO: 20750
  source 1..218: note = Description of Artificial Sequence: Synthetic polypeptide; note = XENP021183 7G8_H0_L0.106_Fab Light Chain

SEQ ID NO: 31580 - protein, 111 aa, synthetic construct; identical to SEQ ID NO: 20751
  source 1..111: note = Description of Artificial Sequence: Synthetic polypeptide; note = VL of XENP021183

SEQ ID NO: 31581 - protein, 15 aa, synthetic construct
  source 1..15: note = Description of Artificial Sequence: Synthetic peptide; note = XENP021183 vlCDR1
KASQSVDYDGDSYMN

SEQ ID NO: 31582 - protein, 7 aa, synthetic construct
  source 1..7: note = Description of Artificial Sequence: Synthetic peptide; note = XENP021183 vlCDR2
AASNLES

SEQ ID NO: 31583 - protein, 9 aa, synthetic construct
  source 1..9: note = Description of Artificial Sequence: Synthetic peptide; note = XENP021183 vlCDR3
QQSNEGPFT

SEQ ID NO: 31584 - protein, 226 aa, synthetic construct; identical to SEQ ID NO: 29134
  source 1..226: note = Description of Artificial Sequence: Synthetic polypeptide; note = XENP021184 7G8_H0_L0.107_Fab Heavy Chain

SEQ ID NO: 31585 - protein, 121 aa, synthetic construct; identical to SEQ ID NO: 17586
  source 1..121: note = Description of Artificial Sequence: Synthetic polypeptide; note = VH of XENP021184

SEQ ID NO: 31586 - protein, 5 aa, synthetic construct
  source 1..5: note = Description of Artificial Sequence: Synthetic peptide; note = XENP021184 vhCDR1
DAWMD

SEQ ID NO: 31587 - protein, 19 aa, synthetic construct
  source 1..19: note = Description of Artificial Sequence: Synthetic peptide; note = XENP021184 vhCDR2
EIRTKANNHATYYAESVKG

SEQ ID NO: 31588 - protein, 10 aa, synthetic construct
  source 1..10: note = Description of Artificial Sequence: Synthetic peptide; note = XENP021184 vhCDR3
LANWDWYFDV

SEQ ID NO: 31589 - protein, 218 aa, synthetic construct; identical to SEQ ID NO: 20760
  source 1..218: note = Description of Artificial Sequence: Synthetic polypeptide; note = XENP021184 7G8_H0_L0.107_Fab Light Chain

SEQ ID NO: 31590 - protein, 111 aa, synthetic construct; identical to SEQ ID NO: 20761
  source 1..111: note = Description of Artificial Sequence: Synthetic polypeptide; note = VL of XENP021184

SEQ ID NO: 31591 - protein, 15 aa, synthetic construct
  source 1..15: note = Description of Artificial Sequence: Synthetic peptide; note = XENP021184 vlCDR1
KASQSVDYDGDSYMN

SEQ ID NO: 31592 - protein, 7 aa, synthetic construct
  source 1..7: note = Description of Artificial Sequence: Synthetic peptide; note = XENP021184 vlCDR2
AASNLES

SEQ ID NO: 31593 - protein, 9 aa, synthetic construct
  source 1..9: note = Description of Artificial Sequence: Synthetic peptide; note = XENP021184 vlCDR3
QQSNEYPFT

SEQ ID NO: 31594 - protein, 226 aa, synthetic construct; identical to SEQ ID NO: 28944
  source 1..226: note = Description of Artificial Sequence: Synthetic polypeptide; note = XENP021558 7G8_H3.1_L0.59_Fab Heavy Chain

SEQ ID NO: 31595 - protein, 121 aa, synthetic construct; identical to SEQ ID NO: 28945
  source 1..121: note = Description of Artificial Sequence: Synthetic polypeptide; note = VH of XENP021558

SEQ ID NO: 31596 - protein, 5 aa, synthetic construct
  source 1..5: note = Description of Artificial Sequence: Synthetic peptide; note = XENP021558 vhCDR1
DAWMD

SEQ ID NO: 31597 - protein, 19 aa, synthetic construct
  source 1..19: note = Description of Artificial Sequence: Synthetic peptide; note = XENP021558 vhCDR2
EIRTKANNHATYYAESVKG

SEQ ID NO: 31598 - protein, 10 aa, synthetic construct
  source 1..10: note = Description of Artificial Sequence: Synthetic peptide; note = XENP021558 vhCDR3
LATWDWYFDV

SEQ ID NO: 31599 - protein, 218 aa, synthetic construct; identical to SEQ ID NO: 20280
  source 1..218: note = Description of Artificial Sequence: Synthetic polypeptide; note = XENP021558 7G8_H3.1_L0.59_Fab Light Chain

SEQ ID NO: 31600 - protein, 111 aa, synthetic construct; identical to SEQ ID NO: 20281
  source 1..111: note = Description of Artificial Sequence: Synthetic polypeptide; note = VL of XENP021558

SEQ ID NO: 31601 - protein, 15 aa, synthetic construct
  source 1..15: note = Description of Artificial Sequence: Synthetic peptide; note = XENP021558 vlCDR1
KASQSVDYDGDSYMN

SEQ ID NO: 31602 - protein, 7 aa, synthetic construct
  source 1..7: note = Description of Artificial Sequence: Synthetic peptide; note = XENP021558 vlCDR2
AASELES

SEQ ID NO: 31603 - protein, 9 aa, synthetic construct
  source 1..9: note = Description of Artificial Sequence: Synthetic peptide; note = XENP021558 vlCDR3
QQSNEDPFT

SEQ ID NO: 31604 - protein, 226 aa, synthetic construct; identical to SEQ ID NO: 28974
  source 1..226: note = Description of Artificial Sequence: Synthetic polypeptide; note = XENP021559 7G8_H3.4_L0.59_Fab Heavy Chain

SEQ ID NO: 31605 - protein, 121 aa, synthetic construct; identical to SEQ ID NO: 28975
  source 1..121: note = Description of Artificial Sequence: Synthetic polypeptide; note = VH of XENP021559

SEQ ID NO: 31606 - protein, 5 aa, synthetic construct
  source 1..5: note = Description of Artificial Sequence: Synthetic peptide; note = XENP021559 vhCDR1
DAWMD

SEQ ID NO: 31607 - protein, 19 aa, synthetic construct
  source 1..19: note = Description of Artificial Sequence: Synthetic peptide; note = XENP021559 vhCDR2
EIRTKANNHATYYAESVKG

SEQ ID NO: 31608 - protein, 10 aa, synthetic construct
  source 1..10: note = Description of Artificial Sequence: Synthetic peptide; note = XENP021559 vhCDR3
LATWDWYFDV

SEQ ID NO: 31609 - protein, 218 aa, synthetic construct; identical to SEQ ID NO: 20280
  source 1..218: note = Description of Artificial Sequence: Synthetic polypeptide; note = XENP021559 7G8_H3.4_L0.59_Fab Light Chain

SEQ ID NO: 31610 - protein, 111 aa, synthetic construct; identical to SEQ ID NO: 20281
  source 1..111: note = Description of Artificial Sequence: Synthetic polypeptide; note = VL of XENP021559

SEQ ID NO: 31611 - protein, 15 aa, synthetic construct
  source 1..15: note = Description of Artificial Sequence: Synthetic peptide; note = XENP021559 vlCDR1
KASQSVDYDGDSYMN

SEQ ID NO: 31612 - protein, 7 aa, synthetic construct
  source 1..7: note = Description of Artificial Sequence: Synthetic peptide; note = XENP021559 vlCDR2
AASELES

SEQ ID NO: 31613 - protein, 9 aa, synthetic construct
  source 1..9: note = Description of Artificial Sequence: Synthetic peptide; note = XENP021559 vlCDR3
QQSNEDPFT

SEQ ID NO: 31614 - protein, 226 aa, synthetic construct; identical to SEQ ID NO: 30404
  source 1..226: note = Description of Artificial Sequence: Synthetic polypeptide; note = XENP021560 7G8_H0.129_L0.59_Fab Heavy Chain

SEQ ID NO: 31615 - protein, 121 aa, synthetic construct; identical to SEQ ID NO: 19496
  source 1..121: note = Description of Artificial Sequence: Synthetic polypeptide; note = VH of XENP021560

SEQ ID NO: 31616 - protein, 5 aa, synthetic construct
  source 1..5: note = Description of Artificial Sequence: Synthetic peptide; note = XENP021560 vhCDR1
DAWMD

SEQ ID NO: 31617 - protein, 19 aa, synthetic construct
  source 1..19: note = Description of Artificial Sequence: Synthetic peptide; note = XENP021560 vhCDR2
EIRTKANNHATYYAESVKG

SEQ ID NO: 31618 - protein, 10 aa, synthetic construct
  source 1..10: note = Description of Artificial Sequence: Synthetic peptide; note = XENP021560 vhCDR3
LATWDWYFDV

SEQ ID NO: 31619 - protein, 218 aa, synthetic construct; identical to SEQ ID NO: 20280
  source 1..218: note = Description of Artificial Sequence: Synthetic polypeptide; note = XENP021560 7G8_H0.129_L0.59_Fab Light Chain

SEQ ID NO: 31620 - protein, 111 aa, synthetic construct; identical to SEQ ID NO: 20281
  source 1..111: note = Description of Artificial Sequence: Synthetic polypeptide; note = VL of XENP021560

SEQ ID NO: 31621 - protein, 15 aa, synthetic construct
  source 1..15: note = Description of Artificial Sequence: Synthetic peptide; note = XENP021560 vlCDR1
KASQSVDYDGDSYMN

SEQ ID NO: 31622 - protein, 7 aa, synthetic construct
  source 1..7: note = Description of Artificial Sequence: Synthetic peptide; note = XENP021560 vlCDR2
AASELES

SEQ ID NO: 31623 - protein, 9 aa, synthetic construct
  source 1..9: note = Description of Artificial Sequence: Synthetic peptide; note = XENP021560 vlCDR3
QQSNEDPFT

SEQ ID NO: 31624 - protein, 226 aa, synthetic construct; identical to SEQ ID NO: 29454
  source 1..226: note = Description of Artificial Sequence: Synthetic polypeptide; note = XENP021561 7G8_H0.31_L0.59_Fab Heavy Chain

SEQ ID NO: 31625 - protein, 121 aa, synthetic construct; identical to SEQ ID NO: 18516
  source 1..121: note = Description of Artificial Sequence: Synthetic polypeptide; note = VH of XENP021561

SEQ ID NO: 31626 - protein, 5 aa, synthetic construct
  source 1..5: note = Description of Artificial Sequence: Synthetic peptide; note = XENP021561 vhCDR1
DAWMD

SEQ ID NO: 31627 - protein, 19 aa, synthetic construct
  source 1..19: note = Description of Artificial Sequence: Synthetic peptide; note = XENP021561 vhCDR2
EISTKANNHATYYAESVKG

SEQ ID NO: 31628 - protein, 10 aa, synthetic construct
  source 1..10: note = Description of Artificial Sequence: Synthetic peptide; note = XENP021561 vhCDR3
LANWDWYFDV

SEQ ID NO: 31629 - protein, 218 aa, synthetic construct; identical to SEQ ID NO: 20280
  source 1..218: note = Description of Artificial Sequence: Synthetic polypeptide; note = XENP021561 7G8_H0.31_L0.59_Fab Light Chain

SEQ ID NO: 31630 - protein, 111 aa, synthetic construct; identical to SEQ ID NO: 20281
  source 1..111: note = Description of Artificial Sequence: Synthetic polypeptide; note = VL of XENP021561

SEQ ID NO: 31631 - protein, 15 aa, synthetic construct
  source 1..15: note = Description of Artificial Sequence: Synthetic peptide; note = XENP021561 vlCDR1
KASQSVDYDGDSYMN

SEQ ID NO: 31632 - protein, 7 aa, synthetic construct
  source 1..7: note = Description of Artificial Sequence: Synthetic peptide; note = XENP021561 vlCDR2
AASELES

SEQ ID NO: 31633 - protein, 9 aa, synthetic construct
  source 1..9: note = Description of Artificial Sequence: Synthetic peptide; note = XENP021561 vlCDR3
QQSNEDPFT

SEQ ID NO: 31634 - protein, 226 aa, synthetic construct; identical to SEQ ID NO: 30174
  source 1..226: note = Description of Artificial Sequence: Synthetic polypeptide; note = XENP021562 7G8_H0.103_L0.59_Fab Heavy Chain

SEQ ID NO: 31635 - protein, 121 aa, synthetic construct; identical to SEQ ID NO: 19236
  source 1..121: note = Description of Artificial Sequence: Synthetic polypeptide; note = VH of XENP021562

SEQ ID NO: 31636 - protein, 5 aa, synthetic construct
  source 1..5: note = Description of Artificial Sequence: Synthetic peptide; note = XENP021562 vhCDR1
DAWMD

SEQ ID NO: 31637 - protein, 19 aa, synthetic construct
  source 1..19: note = Description of Artificial Sequence: Synthetic peptide; note = XENP021562 vhCDR2
EIRTKANNHATDYAESVKG

SEQ ID NO: 31638 - protein, 10 aa, synthetic construct
  source 1..10: note = Description of Artificial Sequence: Synthetic peptide; note = XENP021562 vhCDR3
LANWDWYFDV

SEQ ID NO: 31639 - protein, 218 aa, synthetic construct; identical to SEQ ID NO: 20280
  source 1..218: note = Description of Artificial Sequence: Synthetic polypeptide; note = XENP021562 7G8_H0.103_L0.59_Fab Light Chain

SEQ ID NO: 31640 - protein, 111 aa, synthetic construct; identical to SEQ ID NO: 20281
  source 1..111: note = Description of Artificial Sequence: Synthetic polypeptide; note = VL of XENP021562

SEQ ID NO: 31641 - protein, 15 aa, synthetic construct
  source 1..15: note = Description of Artificial Sequence: Synthetic peptide; note = XENP021562 vlCDR1
KASQSVDYDGDSYMN

SEQ ID NO: 31642 - protein, 7 aa, synthetic construct
  source 1..7: note = Description of Artificial Sequence: Synthetic peptide; note = XENP021562 vlCDR2
AASELES

SEQ ID NO: 31643 - protein, 9 aa, synthetic construct
  source 1..9: note = Description of Artificial Sequence: Synthetic peptide; note = XENP021562 vlCDR3
QQSNEDPFT

SEQ ID NO: 31644 - protein, 226 aa, synthetic construct; identical to SEQ ID NO: 29854
  source 1..226: note = Description of Artificial Sequence: Synthetic polypeptide; note = XENP021563 7G8_H0.71_L0.59_Fab Heavy Chain

SEQ ID NO: 31645 - protein, 121 aa, synthetic construct; identical to SEQ ID NO: 18916
  source 1..121: note = Description of Artificial Sequence: Synthetic polypeptide; note = VH of XENP021563

SEQ ID NO: 31646 - protein, 5 aa, synthetic construct
  source 1..5: note = Description of Artificial Sequence: Synthetic peptide; note = XENP021563 vhCDR1
DAWMD

SEQ ID NO: 31647 - protein, 19 aa, synthetic construct
  source 1..19: note = Description of Artificial Sequence: Synthetic peptide; note = XENP021563 vhCDR2
EIRTKAYNHATYYAESVKG

SEQ ID NO: 31648 - protein, 10 aa, synthetic construct
  source 1..10: note = Description of Artificial Sequence: Synthetic peptide; note = XENP021563 vhCDR3
LANWDWYFDV

SEQ ID NO: 31649 - protein, 218 aa, synthetic construct; identical to SEQ ID NO: 20280
  source 1..218: note = Description of Artificial Sequence: Synthetic polypeptide; note = XENP021563 7G8_H0.71_L0.59_Fab Light Chain

SEQ ID NO: 31650 - protein, 111 aa, synthetic construct; identical to SEQ ID NO: 20281
  source 1..111: note = Description of Artificial Sequence: Synthetic polypeptide; note = VL of XENP021563

SEQ ID NO: 31651 - protein, 15 aa, synthetic construct
  source 1..15: note = Description of Artificial Sequence: Synthetic peptide; note = XENP021563 vlCDR1
KASQSVDYDGDSYMN

SEQ ID NO: 31652 - protein, 7 aa, synthetic construct
  source 1..7: note = Description of Artificial Sequence: Synthetic peptide; note = XENP021563 vlCDR2
AASELES

SEQ ID NO: 31653 - protein, 9 aa, synthetic construct
  source 1..9: note = Description of Artificial Sequence: Synthetic peptide; note = XENP021563 vlCDR3
QQSNEDPFT

SEQ ID NO: 31654 - protein, 226 aa, synthetic construct; identical to SEQ ID NO: 28944
  source 1..226: note = Description of Artificial Sequence: Synthetic polypeptide; note = XENP021564 7G8_H3.1_L0_Fab Heavy Chain

SEQ ID NO: 31655 - protein, 121 aa, synthetic construct; identical to SEQ ID NO: 28945
  source 1..121: note = Description of Artificial Sequence: Synthetic polypeptide; note = VH of XENP021564

SEQ ID NO: 31656 - protein, 5 aa, synthetic construct
  source 1..5: note = Description of Artificial Sequence: Synthetic peptide; note = XENP021564 vhCDR1
DAWMD

SEQ ID NO: 31657 - protein, 19 aa, synthetic construct
  source 1..19: note = Description of Artificial Sequence: Synthetic peptide; note = XENP021564 vhCDR2
EIRTKANNHATYYAESVKG

SEQ ID NO: 31658 - protein, 10 aa, synthetic construct
  source 1..10: note = Description of Artificial Sequence: Synthetic peptide; note = XENP021564 vhCDR3
LATWDWYFDV

SEQ ID NO: 31659 - protein, 218 aa, synthetic construct; identical to SEQ ID NO: 17590
  source 1..218: note = Description of Artificial Sequence: Synthetic polypeptide; note = XENP021564 7G8_H3.1_L0_Fab Light Chain

SEQ ID NO: 31660 - protein, 111 aa, synthetic construct; identical to SEQ ID NO: 17591
  source 1..111: note = Description of Artificial Sequence: Synthetic polypeptide; note = VL of XENP021564

SEQ ID NO: 31661 - protein, 15 aa, synthetic construct
  source 1..15: note = Description of Artificial Sequence: Synthetic peptide; note = XENP021564 vlCDR1
KASQSVDYDGDSYMN

SEQ ID NO: 31662 - protein, 7 aa, synthetic construct
  source 1..7: note = Description of Artificial Sequence: Synthetic peptide; note = XENP021564 vlCDR2
AASNLES

SEQ ID NO: 31663 - protein, 9 aa, synthetic construct
  source 1..9: note = Description of Artificial Sequence: Synthetic peptide; note = XENP021564 vlCDR3
QQSNEDPFT

SEQ ID NO: 31664 - protein, 226 aa, synthetic construct; identical to SEQ ID NO: 28974
  source 1..226: note = Description of Artificial Sequence: Synthetic polypeptide; note = XENP021565 7G8_H3.4_L0_Fab Heavy Chain

SEQ ID NO: 31665 - protein, 121 aa, synthetic construct; identical to SEQ ID NO: 28975
  source 1..121: note = Description of Artificial Sequence: Synthetic polypeptide; note = VH of XENP021565

SEQ ID NO: 31666 - protein, 5 aa, synthetic construct
  source 1..5: note = Description of Artificial Sequence: Synthetic peptide; note = XENP021565 vhCDR1
DAWMD

SEQ ID NO: 31667 - protein, 19 aa, synthetic construct
  source 1..19: note = Description of Artificial Sequence: Synthetic peptide; note = XENP021565 vhCDR2
EIRTKANNHATYYAESVKG

SEQ ID NO: 31668 - protein, 10 aa, synthetic construct
  source 1..10: note = Description of Artificial Sequence: Synthetic peptide; note = XENP021565 vhCDR3
LATWDWYFDV

SEQ ID NO: 31669 - protein, 218 aa, synthetic construct; identical to SEQ ID NO: 17590
  source 1..218: note = Description of Artificial Sequence: Synthetic polypeptide; note = XENP021565 7G8_H3.4_L0_Fab Light Chain

SEQ ID NO: 31670 - protein, 111 aa, synthetic construct; identical to SEQ ID NO: 17591
  source 1..111: note = Description of Artificial Sequence: Synthetic polypeptide; note = VL of XENP021565

SEQ ID NO: 31671 - protein, 15 aa, synthetic construct
  source 1..15: note = Description of Artificial Sequence: Synthetic peptide; note = XENP021565 vlCDR1
KASQSVDYDGDSYMN

SEQ ID NO: 31672 - protein, 7 aa, synthetic construct
  source 1..7: note = Description of Artificial Sequence: Synthetic peptide; note = XENP021565 vlCDR2
AASNLES

SEQ ID NO: 31673 - protein, 9 aa, synthetic construct
  source 1..9: note = Description of Artificial Sequence: Synthetic peptide; note = XENP021565 vlCDR3
QQSNEDPFT

SEQ ID NO: 31674 - protein, 226 aa, synthetic construct; identical to SEQ ID NO: 28944
  source 1..226: note = Description of Artificial Sequence: Synthetic polypeptide; note = XENP021566 7G8_H3.1_L0.11_Fab Heavy Chain

SEQ ID NO: 31675 - protein, 121 aa, synthetic construct; identical to SEQ ID NO: 28945
  source 1..121: note = Description of Artificial Sequence: Synthetic polypeptide; note = VH of XENP021566

SEQ ID NO: 31676 - protein, 5 aa, synthetic construct
  source 1..5: note = Description of Artificial Sequence: Synthetic peptide; note = XENP021566 vhCDR1
DAWMD

SEQ ID NO: 31677 - protein, 19 aa, synthetic construct
  source 1..19: note = Description of Artificial Sequence: Synthetic peptide; note = XENP021566 vhCDR2
EIRTKANNHATYYAESVKG

SEQ ID NO: 31678 - protein, 10 aa, synthetic construct
  source 1..10: note = Description of Artificial Sequence: Synthetic peptide; note = XENP021566 vhCDR3
LATWDWYFDV

SEQ ID NO: 31679 - protein, 218 aa, synthetic construct; identical to SEQ ID NO: 19800
  source 1..218: note = Description of Artificial Sequence: Synthetic polypeptide; note = XENP021566 7G8_H3.1_L0.11_Fab Light Chain

SEQ ID NO: 31680 - protein, 111 aa, synthetic construct; identical to SEQ ID NO: 19801
  source 1..111: note = Description of Artificial Sequence: Synthetic polypeptide; note = VL of XENP021566

SEQ ID NO: 31681 - protein, 15 aa, synthetic construct
  source 1..15: note = Description of Artificial Sequence: Synthetic peptide; note = XENP021566 vlCDR1
KASQSVDHDGDSYMN

SEQ ID NO: 31682 - protein, 7 aa, synthetic construct
  source 1..7: note = Description of Artificial Sequence: Synthetic peptide; note = XENP021566 vlCDR2
AASNLES

SEQ ID NO: 31683 - protein, 9 aa, synthetic construct
  source 1..9: note = Description of Artificial Sequence: Synthetic peptide; note = XENP021566 vlCDR3
QQSNEDPFT

SEQ ID NO: 31684 - protein, 226 aa, synthetic construct; identical to SEQ ID NO: 28974
  source 1..226: note = Description of Artificial Sequence: Synthetic polypeptide; note = XENP021567 7G8_H3.4_L0.11_Fab Heavy Chain

SEQ ID NO: 31685 - protein, 121 aa, synthetic construct; identical to SEQ ID NO: 28975
  source 1..121: note = Description of Artificial Sequence: Synthetic polypeptide; note = VH of XENP021567

SEQ ID NO: 31686 - protein, 5 aa, synthetic construct
  source 1..5: note = Description of Artificial Sequence: Synthetic peptide; note = XENP021567 vhCDR1
DAWMD

SEQ ID NO: 31687 - protein, 19 aa, synthetic construct
  source 1..19: note = Description of Artificial Sequence: Synthetic peptide; note = XENP021567 vhCDR2
EIRTKANNHATYYAESVKG

SEQ ID NO: 31688 - protein, 10 aa, synthetic construct
  source 1..10: note = Description of Artificial Sequence: Synthetic peptide; note = XENP021567 vhCDR3
LATWDWYFDV

SEQ ID NO: 31689 - protein, 218 aa, synthetic construct; identical to SEQ ID NO: 19800
  source 1..218: note = Description of Artificial Sequence: Synthetic polypeptide; note = XENP021567 7G8_H3.4_L0.11_Fab Light Chain

SEQ ID NO: 31690 - protein, 111 aa, synthetic construct; identical to SEQ ID NO: 19801
  source 1..111: note = Description of Artificial Sequence: Synthetic polypeptide; note = VL of XENP021567

SEQ ID NO: 31691 - protein, 15 aa, synthetic construct
  source 1..15: note = Description of Artificial Sequence: Synthetic peptide; note = XENP021567 vlCDR1
KASQSVDHDGDSYMN

SEQ ID NO: 31692 - protein, 7 aa, synthetic construct
  source 1..7: note = Description of Artificial Sequence: Synthetic peptide; note = XENP021567 vlCDR2
AASNLES

SEQ ID NO: 31693 - protein, 9 aa, synthetic construct
  source 1..9: note = Description of Artificial Sequence: Synthetic peptide; note = XENP021567 vlCDR3
QQSNEDPFT

SEQ ID NO: 31694 - protein, 226 aa, synthetic construct; identical to SEQ ID NO: 30404
  source 1..226: note = Description of Artificial Sequence: Synthetic polypeptide; note = XENP021568 7G8_H0.129_L0.11_Fab Heavy Chain

SEQ ID NO: 31695 - protein, 121 aa, synthetic construct; identical to SEQ ID NO: 19496
  source 1..121: note = Description of Artificial Sequence: Synthetic polypeptide; note = VH of XENP021568

SEQ ID NO: 31696 - protein, 5 aa, synthetic construct
  source 1..5: note = Description of Artificial Sequence: Synthetic peptide; note = XENP021568 vhCDR1
DAWMD

SEQ ID NO: 31697 - protein, 19 aa, synthetic construct
  source 1..19: note = Description of Artificial Sequence: Synthetic peptide; note = XENP021568 vhCDR2
EIRTKANNHATYYAESVKG

SEQ ID NO: 31698 - protein, 10 aa, synthetic construct
  source 1..10: note = Description of Artificial Sequence: Synthetic peptide; note = XENP021568 vhCDR3
LATWDWYFDV

SEQ ID NO: 31699 - protein, 218 aa, synthetic construct; identical to SEQ ID NO: 19800
  source 1..218: note = Description of Artificial Sequence: Synthetic polypeptide; note = XENP021568 7G8_H0.129_L0.11_Fab Light Chain

SEQ ID NO: 31700 - protein, 111 aa, synthetic construct; identical to SEQ ID NO: 19801
  source 1..111: note = Description of Artificial Sequence: Synthetic polypeptide; note = VL of XENP021568

SEQ ID NO: 31701 - protein, 15 aa, synthetic construct
  source 1..15: note = Description of Artificial Sequence: Synthetic peptide; note = XENP021568 vlCDR1
KASQSVDHDGDSYMN

SEQ ID NO: 31702 - protein, 7 aa, synthetic construct
  source 1..7: note = Description of Artificial Sequence: Synthetic peptide; note = XENP021568 vlCDR2
AASNLES

SEQ ID NO: 31703 - protein, 9 aa, synthetic construct
  source 1..9: note = Description of Artificial Sequence: Synthetic peptide; note = XENP021568 vlCDR3
QQSNEDPFT

SEQ ID NO: 31704 - protein, 226 aa, synthetic construct; identical to SEQ ID NO: 28944
  source 1..226: note = Description of Artificial Sequence: Synthetic polypeptide; note = XENP021569 7G8_H3.1_L0.34_Fab Heavy Chain

SEQ ID NO: 31705 - protein, 121 aa, synthetic construct; identical to SEQ ID NO: 28945
  source 1..121: note = Description of Artificial Sequence: Synthetic polypeptide; note = VH of XENP021569

SEQ ID NO: 31706 - protein, 5 aa, synthetic construct
  source 1..5: note = Description of Artificial Sequence: Synthetic peptide; note = XENP021569 vhCDR1
DAWMD

SEQ ID NO: 31707 - protein, 19 aa, synthetic construct
  source 1..19: note = Description of Artificial Sequence: Synthetic peptide; note = XENP021569 vhCDR2
EIRTKANNHATYYAESVKG

SEQ ID NO: 31708 - protein, 10 aa, synthetic construct
  source 1..10: note = Description of Artificial Sequence: Synthetic peptide; note = XENP021569 vhCDR3
LATWDWYFDV

SEQ ID NO: 31709 - protein, 218 aa, synthetic construct; identical to SEQ ID NO: 20030
  source 1..218: note = Description of Artificial Sequence: Synthetic polypeptide; note = XENP021569 7G8_H3.1_L0.34_Fab Light Chain

SEQ ID NO: 31710 - protein, 111 aa, synthetic construct; identical to SEQ ID NO: 20031
  source 1..111: note = Description of Artificial Sequence: Synthetic polypeptide; note = VL of XENP021569

SEQ ID NO: 31711 - protein, 15 aa, synthetic construct
  source 1..15: note = Description of Artificial Sequence: Synthetic peptide; note = XENP021569 vlCDR1
KASQSVDYDDDSYMN

SEQ ID NO: 31712 - protein, 7 aa, synthetic construct
  source 1..7: note = Description of Artificial Sequence: Synthetic peptide; note = XENP021569 vlCDR2
AASNLES

SEQ ID NO: 31713 - protein, 9 aa, synthetic construct
  source 1..9: note = Description of Artificial Sequence: Synthetic peptide; note = XENP021569 vlCDR3
QQSNEDPFT

SEQ ID NO: 31714 - protein, 226 aa, synthetic construct; identical to SEQ ID NO: 28974
  source 1..226: note = Description of Artificial Sequence: Synthetic polypeptide; note = XENP021570 7G8_H3.4_L0.34_Fab Heavy Chain

SEQ ID NO: 31715 - protein, 121 aa, synthetic construct; identical to SEQ ID NO: 28975
  source 1..121: note = Description of Artificial Sequence: Synthetic polypeptide; note = VH of XENP021570

SEQ ID NO: 31716 - protein, 5 aa, synthetic construct
  source 1..5: note = Description of Artificial Sequence: Synthetic peptide; note = XENP021570 vhCDR1
DAWMD

SEQ ID NO: 31717 - protein, 19 aa, synthetic construct
  source 1..19: note = Description of Artificial Sequence: Synthetic peptide; note = XENP021570 vhCDR2
EIRTKANNHATYYAESVKG

SEQ ID NO: 31718 - protein, 10 aa, synthetic construct
  source 1..10: note = Description of Artificial Sequence: Synthetic peptide; note = XENP021570 vhCDR3
LATWDWYFDV

SEQ ID NO: 31719 - protein, 218 aa, synthetic construct; identical to SEQ ID NO: 20030
  source 1..218: note = Description of Artificial Sequence: Synthetic polypeptide; note = XENP021570 7G8_H3.4_L0.34_Fab Light Chain

SEQ ID NO: 31720 - protein, 111 aa, synthetic construct; identical to SEQ ID NO: 20031
  source 1..111: note = Description of Artificial Sequence: Synthetic polypeptide; note = VL of XENP021570

SEQ ID NO: 31721 - protein, 15 aa, synthetic construct
  source 1..15: note = Description of Artificial Sequence: Synthetic peptide; note = XENP021570 vlCDR1
KASQSVDYDDDSYMN

SEQ ID NO: 31722 - protein, 7 aa, synthetic construct
  source 1..7: note = Description of Artificial Sequence: Synthetic peptide; note = XENP021570 vlCDR2
AASNLES

SEQ ID NO: 31723 - protein, 9 aa, synthetic construct
  source 1..9: note = Description of Artificial Sequence: Synthetic peptide; note = XENP021570 vlCDR3
QQSNEDPFT

SEQ ID NO: 31724 - protein, 226 aa, synthetic construct; identical to SEQ ID NO: 30404
  source 1..226: note = Description of Artificial Sequence: Synthetic polypeptide; note = XENP021571 7G8_H0.129_L0.34_Fab Heavy Chain

SEQ ID NO: 31725 - protein, 121 aa, synthetic construct; identical to SEQ ID NO: 19496
  source 1..121: note = Description of Artificial Sequence: Synthetic polypeptide; note = VH of XENP021571

SEQ ID NO: 31726 - protein, 5 aa, synthetic construct
  source 1..5: note = Description of Artificial Sequence: Synthetic peptide; note = XENP021571 vhCDR1
DAWMD

SEQ ID NO: 31727 - protein, 19 aa, synthetic construct
  source 1..19: note = Description of Artificial Sequence: Synthetic peptide; note = XENP021571 vhCDR2
EIRTKANNHATYYAESVKG

SEQ ID NO: 31728 - protein, 10 aa, synthetic construct
  source 1..10: note = Description of Artificial Sequence: Synthetic peptide; note = XENP021571 vhCDR3
LATWDWYFDV

SEQ ID NO: 31729 - protein, 218 aa, synthetic construct; identical to SEQ ID NO: 20030
  source 1..218: note = Description of Artificial Sequence: Synthetic polypeptide; note = XENP021571 7G8_H0.129_L0.34_Fab Light Chain

SEQ ID NO: 31730 - protein, 111 aa, synthetic construct; identical to SEQ ID NO: 20031
  source 1..111: note = Description of Artificial Sequence: Synthetic polypeptide; note = VL of XENP021571

SEQ ID NO: 31731 - protein, 15 aa, synthetic construct
  source 1..15: note = Description of Artificial Sequence: Synthetic peptide; note = XENP021571 vlCDR1
KASQSVDYDDDSYMN

SEQ ID NO: 31732 - protein, 7 aa, synthetic construct
  source 1..7: note = Description of Artificial Sequence: Synthetic peptide; note = XENP021571 vlCDR2
AASNLES

SEQ ID NO: 31733 - protein, 9 aa, synthetic construct
  source 1..9: note = Description of Artificial Sequence: Synthetic peptide; note = XENP021571 vlCDR3
QQSNEDPFT

SEQ ID NO: 31734 - protein, 226 aa, synthetic construct
  source 1..226: note = Description of Artificial Sequence: Synthetic polypeptide; note = XENP021662 7G8_H3.18_L1_Fab Heavy Chain
EVQLVESGGGLVQPGGSLRLSCAASGFTFDDAWMDWVRQAPGKGLEWVAEISTKANNHATYYAESVKGRFTISRDDSKSSVYLQMNSLRAEDTAVYYCTRLATWDWYFDVWGQGTTVTVSSASTKGPSVFPLAPSSKSTSGGTAALGCLVKDYFPEPVTVSWNSGALTSGVHTFPAVLQSSGLYSLSSVVTVPSSSLGTQTYICNVNHKPSNTKVDKKVEPKSCGS

SEQ ID NO: 31735 - protein, 121 aa, synthetic construct; identical to SEQ ID NO: 22325
  source 1..121: note = Description of Artificial Sequence: Synthetic polypeptide; note = VH of XENP021662

SEQ ID NO: 31736 - protein, 5 aa, synthetic construct
  source 1..5: note = Description of Artificial Sequence: Synthetic peptide; note = XENP021662 vhCDR1
DAWMD

SEQ ID NO: 31737 - protein, 19 aa, synthetic construct
  source 1..19: note = Description of Artificial Sequence: Synthetic peptide; note = XENP021662 vhCDR2
EISTKANNHATYYAESVKG

SEQ ID NO: 31738 - protein, 10 aa, synthetic construct
  source 1..10: note = Description of Artificial Sequence: Synthetic peptide; note = XENP021662 vhCDR3
LATWDWYFDV

SEQ ID NO: 31739 - protein, 218 aa, synthetic construct; identical to SEQ ID NO: 17600
  source 1..218: note = Description of Artificial Sequence: Synthetic polypeptide; note = XENP021662 7G8_H3.18_L1_Fab Light Chain

SEQ ID NO: 31740 - protein, 111 aa, synthetic construct; identical to SEQ ID NO: 17601
  source 1..111: note = Description of Artificial Sequence: Synthetic polypeptide; note = VL of XENP021662

SEQ ID NO: 31741 - protein, 15 aa, synthetic construct
  source 1..15: note = Description of Artificial Sequence: Synthetic peptide; note = XENP021662 vlCDR1
RASQSVDYDGDSYMN

SEQ ID NO: 31742 - protein, 7 aa, synthetic construct
  source 1..7: note = Description of Artificial Sequence: Synthetic peptide; note = XENP021662 vlCDR2
AASNLES

SEQ ID NO: 31743 - protein, 9 aa, synthetic construct
  source 1..9: note = Description of Artificial Sequence: Synthetic peptide; note = XENP021662 vlCDR3
QQSNEDPFT

SEQ ID NO: 31744 - protein, 226 aa, synthetic construct
  source 1..226: note = Description of Artificial Sequence: Synthetic polypeptide; note = XENP021663 7G8_H3.15_L1_Fab Heavy Chain
EVQLVESGGGLVQPGGSLRLSCAASGDTFDDAWMDWVRQAPGKGLEWVAEISTKANNHATYYAESVKGRFTISRDDSKSSVYLQMNSLRAEDTAVYYCTRLATWDWYFDVWGQGTTVTVSSASTKGPSVFPLAPSSKSTSGGTAALGCLVKDYFPEPVTVSWNSGALTSGVHTFPAVLQSSGLYSLSSVVTVPSSSLGTQTYICNVNHKPSNTKVDKKVEPKSCGS

SEQ ID NO: 31745 - protein, 121 aa, synthetic construct; identical to SEQ ID NO: 22365
  source 1..121: note = Description of Artificial Sequence: Synthetic polypeptide; note = VH of XENP021663

SEQ ID NO: 31746 - protein, 5 aa, synthetic construct
  source 1..5: note = Description of Artificial Sequence: Synthetic peptide; note = XENP021663 vhCDR1
DAWMD

SEQ ID NO: 31747 - protein, 19 aa, synthetic construct
  source 1..19: note = Description of Artificial Sequence: Synthetic peptide; note = XENP021663 vhCDR2
EISTKANNHATYYAESVKG

SEQ ID NO: 31748 - protein, 10 aa, synthetic construct
  source 1..10: note = Description of Artificial Sequence: Synthetic peptide; note = XENP021663 vhCDR3
LATWDWYFDV

SEQ ID NO: 31749 - protein, 218 aa, synthetic construct; identical to SEQ ID NO: 17600
  source 1..218: note = Description of Artificial Sequence: Synthetic polypeptide; note = XENP021663 7G8_H3.15_L1_Fab Light Chain

SEQ ID NO: 31750 - protein, 111 aa, synthetic construct; identical to SEQ ID NO: 17601
  source 1..111: note = Description of Artificial Sequence: Synthetic polypeptide; note = VL of XENP021663

SEQ ID NO: 31751 - protein, 15 aa, synthetic construct
  source 1..15: note = Description of Artificial Sequence: Synthetic peptide; note = XENP021663 vlCDR1
RASQSVDYDGDSYMN

SEQ ID NO: 31752 - protein, 7 aa, synthetic construct
  source 1..7: note = Description of Artificial Sequence: Synthetic peptide; note = XENP021663 vlCDR2
AASNLES

SEQ ID NO: 31753 - protein, 9 aa, synthetic construct
  source 1..9: note = Description of Artificial Sequence: Synthetic peptide; note = XENP021663 vlCDR3
QQSNEDPFT

SEQ ID NO: 31754 - protein, 226 aa, synthetic construct
  source 1..226: note = Description of Artificial Sequence: Synthetic polypeptide; note = XENP021664 7G8_H3.19_L1_Fab Heavy Chain
EVQLVESGGGLVQPGGSLRLSCAASGFTFDDAWMDWVRQAPGKGLEWVAEIRTKAYNHATYYAESVKGRFTISRDDSKSSVYLQMNSLRAEDTAVYYCTRLATWDWYFDVWGQGTTVTVSSASTKGPSVFPLAPSSKSTSGGTAALGCLVKDYFPEPVTVSWNSGALTSGVHTFPAVLQSSGLYSLSSVVTVPSSSLGTQTYICNVNHKPSNTKVDKKVEPKSCGS

SEQ ID NO: 31755 - protein, 121 aa, synthetic construct
  source 1..121: note = Description of Artificial Sequence: Synthetic polypeptide; note = VH of XENP021664
EVQLVESGGGLVQPGGSLRLSCAASGFTFDDAWMDWVRQAPGKGLEWVAEIRTKAYNHATYYAESVKGRFTISRDDSKSSVYLQMNSLRAEDTAVYYCTRLATWDWYFDVWGQGTTVTVSS

SEQ ID NO: 31756 - protein, 5 aa, synthetic construct
  source 1..5: note = Description of Artificial Sequence: Synthetic peptide; note = XENP021664 vhCDR1
DAWMD

SEQ ID NO: 31757 - protein, 19 aa, synthetic construct
  source 1..19: note = Description of Artificial Sequence: Synthetic peptide; note = XENP021664 vhCDR2
EIRTKAYNHATYYAESVKG

SEQ ID NO: 31758 - protein, 10 aa, synthetic construct
  source 1..10: note = Description of Artificial Sequence: Synthetic peptide; note = XENP021664 vhCDR3
LATWDWYFDV

SEQ ID NO: 31759 - protein, 218 aa, synthetic construct; identical to SEQ ID NO: 17600
  source 1..218: note = Description of Artificial Sequence: Synthetic polypeptide; note = XENP021664 7G8_H3.19_L1_Fab Light Chain

SEQ ID NO: 31760 - protein, 111 aa, synthetic construct; identical to SEQ ID NO: 17601
  source 1..111: note = Description of Artificial Sequence: Synthetic polypeptide; note = VL of XENP021664

SEQ ID NO: 31761 - protein, 15 aa, synthetic construct
  source 1..15: note = Description of Artificial Sequence: Synthetic peptide; note = XENP021664 vlCDR1
RASQSVDYDGDSYMN

SEQ ID NO: 31762 - protein, 7 aa, synthetic construct
  source 1..7: note = Description of Artificial Sequence: Synthetic peptide; note = XENP021664 vlCDR2
AASNLES

SEQ ID NO: 31763 - protein, 9 aa, synthetic construct
  source 1..9: note = Description of Artificial Sequence: Synthetic peptide; note = XENP021664 vlCDR3
QQSNEDPFT

SEQ ID NO: 31764 - protein, 226 aa, synthetic construct
  source 1..226: note = Description of Artificial Sequence: Synthetic polypeptide; note = XENP021665 7G8_H3.17_L1_Fab Heavy Chain
EVQLVESGGGLVQPGGSLRLSCAASGDTFDDAWMDWVRQAPGKGLEWVAEIRTKAYNHATYYAESVKGRFTISRDDSKSSVYLQMNSLRAEDTAVYYCTRLATWDWYFDVWGQGTTVTVSSASTKGPSVFPLAPSSKSTSGGTAALGCLVKDYFPEPVTVSWNSGALTSGVHTFPAVLQSSGLYSLSSVVTVPSSSLGTQTYICNVNHKPSNTKVDKKVEPKSCGS

SEQ ID NO: 31765 - protein, 121 aa, synthetic construct
  source 1..121: note = Description of Artificial Sequence: Synthetic polypeptide; note = VH of XENP021665
EVQLVESGGGLVQPGGSLRLSCAASGDTFDDAWMDWVRQAPGKGLEWVAEIRTKAYNHATYYAESVKGRFTISRDDSKSSVYLQMNSLRAEDTAVYYCTRLATWDWYFDVWGQGTTVTVSS

SEQ ID NO: 31766 - protein, 5 aa, synthetic construct
  source 1..5: note = Description of Artificial Sequence: Synthetic peptide; note = XENP021665 vhCDR1
DAWMD

SEQ ID NO: 31767 - protein, 19 aa, synthetic construct
  source 1..19: note = Description of Artificial Sequence: Synthetic peptide; note = XENP021665 vhCDR2
EIRTKAYNHATYYAESVKG

SEQ ID NO: 31768 - protein, 10 aa, synthetic construct
  source 1..10: note = Description of Artificial Sequence: Synthetic peptide; note = XENP021665 vhCDR3
LATWDWYFDV

SEQ ID NO: 31769 - protein, 218 aa, synthetic construct; identical to SEQ ID NO: 17600
  source 1..218: note = Description of Artificial Sequence: Synthetic polypeptide; note = XENP021665 7G8_H3.17_L1_Fab Light Chain

SEQ ID NO: 31770 - protein, 111 aa, synthetic construct; identical to SEQ ID NO: 17601
  source 1..111: note = Description of Artificial Sequence: Synthetic polypeptide; note = VL of XENP021665

SEQ ID NO: 31771 - protein, 15 aa, synthetic construct
  source 1..15: note = Description of Artificial Sequence: Synthetic peptide; note = XENP021665 vlCDR1
RASQSVDYDGDSYMN

SEQ ID NO: 31772 - protein, 7 aa, synthetic construct
  source 1..7: note = Description of Artificial Sequence: Synthetic peptide; note = XENP021665 vlCDR2
AASNLES

SEQ ID NO: 31773 - protein, 9 aa, synthetic construct
  source 1..9: note = Description of Artificial Sequence: Synthetic peptide; note = XENP021665 vlCDR3
QQSNEDPFT

SEQ ID NO: 31774 - protein, 226 aa, synthetic construct
  source 1..226: note = Description of Artificial Sequence: Synthetic polypeptide; note = XENP021666 7G8_H3.16_L1_Fab Heavy Chain
EVQLVESGGGLVQPGGSLRLSCAASGDTFDDAWMDWVRQAPGKGLEWVAEIRTKANNHATDYAESVKGRFTISRDDSKSSVYLQMNSLRAEDTAVYYCTRLATWDWYFDVWGQGTTVTVSSASTKGPSVFPLAPSSKSTSGGTAALGCLVKDYFPEPVTVSWNSGALTSGVHTFPAVLQSSGLYSLSSVVTVPSSSLGTQTYICNVNHKPSNTKVDKKVEPKSCGS

SEQ ID NO: 31775 - protein, 121 aa, synthetic construct
  source 1..121: note = Description of Artificial Sequence: Synthetic polypeptide; note = VH of XENP021666
EVQLVESGGGLVQPGGSLRLSCAASGDTFDDAWMDWVRQAPGKGLEWVAEIRTKANNHATDYAESVKGRFTISRDDSKSSVYLQMNSLRAEDTAVYYCTRLATWDWYFDVWGQGTTVTVSS

SEQ ID NO: 31776 - protein, 5 aa, synthetic construct
  source 1..5: note = Description of Artificial Sequence: Synthetic peptide; note = XENP021666 vhCDR1
DAWMD

SEQ ID NO: 31777 - protein, 19 aa, synthetic construct
  source 1..19: note = Description of Artificial Sequence: Synthetic peptide; note = XENP021666 vhCDR2
EIRTKANNHATDYAESVKG

SEQ ID NO: 31778 - protein, 10 aa, synthetic construct
  source 1..10: note = Description of Artificial Sequence: Synthetic peptide; note = XENP021666 vhCDR3
LATWDWYFDV

SEQ ID NO: 31779 - protein, 218 aa, synthetic construct; identical to SEQ ID NO: 17600
  source 1..218: note = Description of Artificial Sequence: Synthetic polypeptide; note = XENP021666 7G8_H3.16_L1_Fab Light Chain

SEQ ID NO: 31780 - protein, 111 aa, synthetic construct; identical to SEQ ID NO: 17601
  source 1..111: note = Description of Artificial Sequence: Synthetic polypeptide; note = VL of XENP021666

SEQ ID NO: 31781 - protein, 15 aa, synthetic construct
  source 1..15: note = Description of Artificial Sequence: Synthetic peptide; note = XENP021666 vlCDR1
RASQSVDYDGDSYMN

SEQ ID NO: 31782 - protein, 7 aa, synthetic construct
  source 1..7: note = Description of Artificial Sequence: Synthetic peptide; note = XENP021666 vlCDR2
AASNLES

SEQ ID NO: 31783 - protein, 9 aa, synthetic construct
  source 1..9: note = Description of Artificial Sequence: Synthetic peptide; note = XENP021666 vlCDR3
QQSNEDPFT

SEQ ID NO: 31784 - protein, 226 aa, synthetic construct
  source 1..226: note = Description of Artificial Sequence: Synthetic polypeptide; note = XENP021667 7G8_H3.21_L1_Fab Heavy Chain
EVQLVESGGGLVQPGGSLRLSCAASGDTFDDAWMDWVRQAPGKGLEWVAEISTKAYNHATDYAESVKGRFTISRDDSKSSVYLQMNSLRAEDTAVYYCTRLATWDWYFDVWGQGTTVTVSSASTKGPSVFPLAPSSKSTSGGTAALGCLVKDYFPEPVTVSWNSGALTSGVHTFPAVLQSSGLYSLSSVVTVPSSSLGTQTYICNVNHKPSNTKVDKKVEPKSCGS

SEQ ID NO: 31785 - protein, 121 aa, synthetic construct
  source 1..121: note = Description of Artificial Sequence: Synthetic polypeptide; note = VH of XENP021667
EVQLVESGGGLVQPGGSLRLSCAASGDTFDDAWMDWVRQAPGKGLEWVAEISTKAYNHATDYAESVKGRFTISRDDSKSSVYLQMNSLRAEDTAVYYCTRLATWDWYFDVWGQGTTVTVSS

SEQ ID NO: 31786 - protein, 5 aa, synthetic construct
  source 1..5: note = Description of Artificial Sequence: Synthetic peptide; note = XENP021667 vhCDR1
DAWMD

SEQ ID NO: 31787 - protein, 19 aa, synthetic construct
  source 1..19: note = Description of Artificial Sequence: Synthetic peptide; note = XENP021667 vhCDR2
EISTKAYNHATDYAESVKG

SEQ ID NO: 31788 - protein, 10 aa, synthetic construct
  source 1..10: note = Description of Artificial Sequence: Synthetic peptide; note = XENP021667 vhCDR3
LATWDWYFDV

SEQ ID NO: 31789 - protein, 218 aa, synthetic construct; identical to SEQ ID NO: 17600
  source 1..218: note = Description of Artificial Sequence: Synthetic polypeptide; note = XENP021667 7G8_H3.21_L1_Fab Light Chain

SEQ ID NO: 31790 - protein, 111 aa, synthetic construct; identical to SEQ ID NO: 17601
  source 1..111: note = Description of Artificial Sequence: Synthetic polypeptide; note = VL of XENP021667

SEQ ID NO: 31791 - protein, 15 aa, synthetic construct
  source 1..15: note = Description of Artificial Sequence: Synthetic peptide; note = XENP021667 vlCDR1
RASQSVDYDGDSYMN

SEQ ID NO: 31792 - protein, 7 aa, synthetic construct
  source 1..7: note = Description of Artificial Sequence: Synthetic peptide; note = XENP021667 vlCDR2
AASNLES

SEQ ID NO: 31793 - protein, 9 aa, synthetic construct
  source 1..9: note = Description of Artificial Sequence: Synthetic peptide; note = XENP021667 vlCDR3
QQSNEDPFT

SEQ ID NO: 31794 - protein, 226 aa, synthetic construct
  source 1..226: note = Description of Artificial Sequence: Synthetic polypeptide; note = XENP021668 7G8_H3.22_L1_Fab Heavy Chain
EVQLVESGGGLVQPGGSLRLSCAASGFTFDDAWMDWVRQAPGKGLEWVAEISTKAYNHATDYAESVKGRFTISRDDSKSSVYLQMNSLRAEDTAVYYCTRLATWDWYFDVWGQGTTVTVSSASTKGPSVFPLAPSSKSTSGGTAALGCLVKDYFPEPVTVSWNSGALTSGVHTFPAVLQSSGLYSLSSVVTVPSSSLGTQTYICNVNHKPSNTKVDKKVEPKSCGS

SEQ ID NO: 31795 - protein, 121 aa, synthetic construct
  source 1..121: note = Description of Artificial Sequence: Synthetic polypeptide; note = VH of XENP021668
EVQLVESGGGLVQPGGSLRLSCAASGFTFDDAWMDWVRQAPGKGLEWVAEISTKAYNHATDYAESVKGRFTISRDDSKSSVYLQMNSLRAEDTAVYYCTRLATWDWYFDVWGQGTTVTVSS

SEQ ID NO: 31796 - protein, 5 aa, synthetic construct
  source 1..5: note = Description of Artificial Sequence: Synthetic peptide; note = XENP021668 vhCDR1
DAWMD

SEQ ID NO: 31797 - protein, 19 aa, synthetic construct
  source 1..19: note = Description of Artificial Sequence: Synthetic peptide; note = XENP021668 vhCDR2
EISTKAYNHATDYAESVKG

SEQ ID NO: 31798 - protein, 10 aa, synthetic construct
  source 1..10: note = Description of Artificial Sequence: Synthetic peptide; note = XENP021668 vhCDR3
LATWDWYFDV

SEQ ID NO: 31799 - protein, 218 aa, synthetic construct; identical to SEQ ID NO: 17600
  source 1..218: note = Description of Artificial Sequence: Synthetic polypeptide; note = XENP021668 7G8_H3.22_L1_Fab Light Chain

SEQ ID NO: 31800 - protein, 111 aa, synthetic construct; identical to SEQ ID NO: 17601
  source 1..111: note = Description of Artificial Sequence: Synthetic polypeptide; note = VL of XENP021668

SEQ ID NO: 31801 - protein, 15 aa, synthetic construct
  source 1..15: note = Description of Artificial Sequence: Synthetic peptide; note = XENP021668 vlCDR1
RASQSVDYDGDSYMN

SEQ ID NO: 31802 - protein, 7 aa, synthetic construct
  source 1..7: note = Description of Artificial Sequence: Synthetic peptide; note = XENP021668 vlCDR2
AASNLES

SEQ ID NO: 31803 - protein, 9 aa, synthetic construct
  source 1..9: note = Description of Artificial Sequence: Synthetic peptide; note = XENP021668 vlCDR3
QQSNEDPFT

SEQ ID NO: 31804 - protein, 226 aa, synthetic construct
  source 1..226: note = Description of Artificial Sequence: Synthetic polypeptide; note = XENP021669 7G8_H3.23_L1_Fab Heavy Chain
EVQLVESGGGLVQPGGSLRLSCAASGFTFSDAWMDWVRQAPGKGLEWVAEISTKANNHATYYAESVKGRFTISRDDSKSSVYLQMNSLRAEDTAVYYCTRLATWDWYFDVWGQGTTVTVSSASTKGPSVFPLAPSSKSTSGGTAALGCLVKDYFPEPVTVSWNSGALTSGVHTFPAVLQSSGLYSLSSVVTVPSSSLGTQTYICNVNHKPSNTKVDKKVEPKSCGS

SEQ ID NO: 31805 - protein, 121 aa, synthetic construct; identical to SEQ ID NO: 22385
  source 1..121: note = Description of Artificial Sequence: Synthetic polypeptide; note = VH of XENP021669

SEQ ID NO: 31806 - protein, 5 aa, synthetic construct
  source 1..5: note = Description of Artificial Sequence: Synthetic peptide; note = XENP021669 vhCDR1
DAWMD

SEQ ID NO: 31807 - protein, 19 aa, synthetic construct
  source 1..19: note = Description of Artificial Sequence: Synthetic peptide; note = XENP021669 vhCDR2
EISTKANNHATYYAESVKG

SEQ ID NO: 31808 - protein, 10 aa, synthetic construct
  source 1..10: note = Description of Artificial Sequence: Synthetic peptide; note = XENP021669 vhCDR3
LATWDWYFDV

SEQ ID NO: 31809 - protein, 218 aa, synthetic construct; identical to SEQ ID NO: 17600
  source 1..218: note = Description of Artificial Sequence: Synthetic polypeptide; note = XENP021669 7G8_H3.23_L1_Fab Light Chain

SEQ ID NO: 31810 - protein, 111 aa, synthetic construct; identical to SEQ ID NO: 17601
  source 1..111: note = Description of Artificial Sequence: Synthetic polypeptide; note = VL of XENP021669

SEQ ID NO: 31811 - protein, 15 aa, synthetic construct
  source 1..15: note = Description of Artificial Sequence: Synthetic peptide; note = XENP021669 vlCDR1
RASQSVDYDGDSYMN

SEQ ID NO: 31812 - protein, 7 aa, synthetic construct
  source 1..7: note = Description of Artificial Sequence: Synthetic peptide; note = XENP021669 vlCDR2
AASNLES

SEQ ID NO: 31813 - protein, 9 aa, synthetic construct
  source 1..9: note = Description of Artificial Sequence: Synthetic peptide; note = XENP021669 vlCDR3
QQSNEDPFT

SEQ ID NO: 31814 - protein, 226 aa, synthetic construct; identical to SEQ ID NO: 31734
  source 1..226: note = Description of Artificial Sequence: Synthetic polypeptide; note = XENP021670 7G8_H3.18_L1.11_Fab Heavy Chain

SEQ ID NO: 31815 - protein, 121 aa, synthetic construct; identical to SEQ ID NO: 22325
  source 1..121: note = Description of Artificial Sequence: Synthetic polypeptide; note = VH of XENP021670

SEQ ID NO: 31816 - protein, 5 aa, synthetic construct
  source 1..5: note = Description of Artificial Sequence: Synthetic peptide; note = XENP021670 vhCDR1
DAWMD

SEQ ID NO: 31817 - protein, 19 aa, synthetic construct
  source 1..19: note = Description of Artificial Sequence: Synthetic peptide; note = XENP021670 vhCDR2
EISTKANNHATYYAESVKG

SEQ ID NO: 31818 - protein, 10 aa, synthetic construct
  source 1..10: note = Description of Artificial Sequence: Synthetic peptide; note = XENP021670 vhCDR3
LATWDWYFDV

SEQ ID NO: 31819 - protein, 218 aa, synthetic construct; identical to SEQ ID NO: 22359
  source 1..218: note = Description of Artificial Sequence: Synthetic polypeptide; note = XENP021670 7G8_H3.18_L1.11_Fab Light Chain

SEQ ID NO: 31820 - protein, 111 aa, synthetic construct; identical to SEQ ID NO: 22360
  source 1..111: note = Description of Artificial Sequence: Synthetic polypeptide; note = VL of XENP021670

SEQ ID NO: 31821 - protein, 15 aa, synthetic construct
  source 1..15: note = Description of Artificial Sequence: Synthetic peptide; note = XENP021670 vlCDR1
RASQSVDYDGDSYMN

SEQ ID NO: 31822 - protein, 7 aa, synthetic construct
  source 1..7: note = Description of Artificial Sequence: Synthetic peptide; note = XENP021670 vlCDR2
AASELES

SEQ ID NO: 31823 - protein, 9 aa, synthetic construct
  source 1..9: note = Description of Artificial Sequence: Synthetic peptide; note = XENP021670 vlCDR3
QQSNEDPFT

SEQ ID NO: 31824 - protein, 226 aa, synthetic construct; identical to SEQ ID NO: 31744
  source 1..226: note = Description of Artificial Sequence: Synthetic polypeptide; note = XENP021671 7G8_H3.15_L1.11_Fab Heavy Chain

SEQ ID NO: 31825 - protein, 121 aa, synthetic construct; identical to SEQ ID NO: 22365
  source 1..121: note = Description of Artificial Sequence: Synthetic polypeptide; note = VH of XENP021671

SEQ ID NO: 31826 - protein, 5 aa, synthetic construct
  source 1..5: note = Description of Artificial Sequence: Synthetic peptide; note = XENP021671 vhCDR1
DAWMD

SEQ ID NO: 31827 - protein, 19 aa, synthetic construct
  source 1..19: note = Description of Artificial Sequence: Synthetic peptide; note = XENP021671 vhCDR2
EISTKANNHATYYAESVKG

SEQ ID NO: 31828 - protein, 10 aa, synthetic construct
  source 1..10: note = Description of Artificial Sequence: Synthetic peptide; note = XENP021671 vhCDR3
LATWDWYFDV

SEQ ID NO: 31829 - protein, 218 aa, synthetic construct; identical to SEQ ID NO: 22359
  source 1..218: note = Description of Artificial Sequence: Synthetic polypeptide; note = XENP021671 7G8_H3.15_L1.11_Fab Light Chain

SEQ ID NO: 31830 - protein, 111 aa, synthetic construct; identical to SEQ ID NO: 22360
  source 1..111: note = Description of Artificial Sequence: Synthetic polypeptide; note = VL of XENP021671

SEQ ID NO: 31831 - protein, 15 aa, synthetic construct
  source 1..15: note = Description of Artificial Sequence: Synthetic peptide; note = XENP021671 vlCDR1
RASQSVDYDGDSYMN

SEQ ID NO: 31832 - protein, 7 aa, synthetic construct
  source 1..7: note = Description of Artificial Sequence: Synthetic peptide; note = XENP021671 vlCDR2
AASELES

SEQ ID NO: 31833 - protein, 9 aa, synthetic construct
  source 1..9: note = Description of Artificial Sequence: Synthetic peptide; note = XENP021671 vlCDR3
QQSNEDPFT

SEQ ID NO: 31834 - protein, 226 aa, synthetic construct; identical to SEQ ID NO: 31754
  source 1..226: note = Description of Artificial Sequence: Synthetic polypeptide; note = XENP021672 7G8_H3.19_L1.11_Fab Heavy Chain

SEQ ID NO: 31835 - protein, 121 aa, synthetic construct; identical to SEQ ID NO: 31755
  source 1..121: note = Description of Artificial Sequence: Synthetic polypeptide; note = VH of XENP021672

SEQ ID NO: 31836 - protein, 5 aa, synthetic construct
  source 1..5: note = Description of Artificial Sequence: Synthetic peptide; note = XENP021672 vhCDR1
DAWMD

SEQ ID NO: 31837 - protein, 19 aa, synthetic construct
  source 1..19: note = Description of Artificial Sequence: Synthetic peptide; note = XENP021672 vhCDR2
EIRTKAYNHATYYAESVKG

SEQ ID NO: 31838 - protein, 10 aa, synthetic construct
  source 1..10: note = Description of Artificial Sequence: Synthetic peptide; note = XENP021672 vhCDR3
LATWDWYFDV

SEQ ID NO: 31839 - protein, 218 aa, synthetic construct; identical to SEQ ID NO: 22359
  source 1..218: note = Description of Artificial Sequence: Synthetic polypeptide; note = XENP021672 7G8_H3.19_L1.11_Fab Light Chain

SEQ ID NO: 31840 - protein, 111 aa, synthetic construct; identical to SEQ ID NO: 22360
  source 1..111: note = Description of Artificial Sequence: Synthetic polypeptide; note = VL of XENP021672

SEQ ID NO: 31841 - protein, 15 aa, synthetic construct
  source 1..15: note = Description of Artificial Sequence: Synthetic peptide; note = XENP021672 vlCDR1
RASQSVDYDGDSYMN

SEQ ID NO: 31842 - protein, 7 aa, synthetic construct
  source 1..7: note = Description of Artificial Sequence: Synthetic peptide; note = XENP021672 vlCDR2
AASELES

SEQ ID NO: 31843 - protein, 9 aa, synthetic construct
  source 1..9: note = Description of Artificial Sequence: Synthetic peptide; note = XENP021672 vlCDR3
QQSNEDPFT

SEQ ID NO: 31844 - protein, 226 aa, synthetic construct; identical to SEQ ID NO: 31764
  source 1..226: note = Description of Artificial Sequence: Synthetic polypeptide; note = XENP021673 7G8_H3.17_L1.11_Fab Heavy Chain

SEQ ID NO: 31845 - protein, 121 aa, synthetic construct; identical to SEQ ID NO: 31765
  source 1..121: note = Description of Artificial Sequence: Synthetic polypeptide; note = VH of XENP021673

SEQ ID NO: 31846 - protein, 5 aa, synthetic construct
  source 1..5: note = Description of Artificial Sequence: Synthetic peptide; note = XENP021673 vhCDR1
DAWMD

SEQ ID NO: 31847 - protein, 19 aa, synthetic construct
  source 1..19: note = Description of Artificial Sequence: Synthetic peptide; note = XENP021673 vhCDR2
EIRTKAYNHATYYAESVKG

SEQ ID NO: 31848 - protein, 10 aa, synthetic construct
  source 1..10: note = Description of Artificial Sequence: Synthetic peptide; note = XENP021673 vhCDR3
LATWDWYFDV

SEQ ID NO: 31849 - protein, 218 aa, synthetic construct; identical to SEQ ID NO: 22359
  source 1..218: note = Description of Artificial Sequence: Synthetic polypeptide; note = XENP021673 7G8_H3.17_L1.11_Fab Light Chain

SEQ ID NO: 31850 - protein, 111 aa, synthetic construct; identical to SEQ ID NO: 22360
  source 1..111: note = Description of Artificial Sequence: Synthetic polypeptide; note = VL of XENP021673

SEQ ID NO: 31851 - protein, 15 aa, synthetic construct
  source 1..15: note = Description of Artificial Sequence: Synthetic peptide; note = XENP021673 vlCDR1
RASQSVDYDGDSYMN

SEQ ID NO: 31852 - protein, 7 aa, synthetic construct
  source 1..7: note = Description of Artificial Sequence: Synthetic peptide; note = XENP021673 vlCDR2
AASELES

SEQ ID NO: 31853 - protein, 9 aa, synthetic construct
  source 1..9: note = Description of Artificial Sequence: Synthetic peptide; note = XENP021673 vlCDR3
QQSNEDPFT

SEQ ID NO: 31854 - protein, 226 aa, synthetic construct; identical to SEQ ID NO: 31774
  source 1..226: note = Description of Artificial Sequence: Synthetic polypeptide; note = XENP021674 7G8_H3.16_L1.11_Fab Heavy Chain

SEQ ID NO: 31855 - protein, 121 aa, synthetic construct; identical to SEQ ID NO: 31775
  source 1..121: note = Description of Artificial Sequence: Synthetic polypeptide; note = VH of XENP021674

SEQ ID NO: 31856 - protein, 5 aa, synthetic construct
  source 1..5: note = Description of Artificial Sequence: Synthetic peptide; note = XENP021674 vhCDR1
DAWMD

SEQ ID NO: 31857 - protein, 19 aa, synthetic construct
  source 1..19: note = Description of Artificial Sequence: Synthetic peptide; note = XENP021674 vhCDR2
EIRTKANNHATDYAESVKG

SEQ ID NO: 31858 - protein, 10 aa, synthetic construct
  source 1..10: note = Description of Artificial Sequence: Synthetic peptide; note = XENP021674 vhCDR3
LATWDWYFDV

SEQ ID NO: 31859 - protein, 218 aa, synthetic construct; identical to SEQ ID NO: 22359
  source 1..218: note = Description of Artificial Sequence: Synthetic polypeptide; note = XENP021674 7G8_H3.16_L1.11_Fab Light Chain

SEQ ID NO: 31860 - protein, 111 aa, synthetic construct; identical to SEQ ID NO: 22360
  source 1..111: note = Description of Artificial Sequence: Synthetic polypeptide; note = VL of XENP021674

SEQ ID NO: 31861 - protein, 15 aa, synthetic construct
  source 1..15: note = Description of Artificial Sequence: Synthetic peptide; note = XENP021674 vlCDR1
RASQSVDYDGDSYMN

SEQ ID NO: 31862 - protein, 7 aa, synthetic construct
  source 1..7: note = Description of Artificial Sequence: Synthetic peptide; note = XENP021674 vlCDR2
AASELES

SEQ ID NO: 31863 - protein, 9 aa, synthetic construct
  source 1..9: note = Description of Artificial Sequence: Synthetic peptide; note = XENP021674 vlCDR3
QQSNEDPFT

SEQ ID NO: 31864 - protein, 226 aa, synthetic construct; identical to SEQ ID NO: 31784
  source 1..226: note = Description of Artificial Sequence: Synthetic polypeptide; note = XENP021675 7G8_H3.21_L1.11_Fab Heavy Chain

SEQ ID NO: 31865 - protein, 121 aa, synthetic construct; identical to SEQ ID NO: 31785
  source 1..121: note = Description of Artificial Sequence: Synthetic polypeptide; note = VH of XENP021675

SEQ ID NO: 31866 - protein, 5 aa, synthetic construct
  source 1..5: note = Description of Artificial Sequence: Synthetic peptide; note = XENP021675 vhCDR1
DAWMD

SEQ ID NO: 31867 - protein, 19 aa, synthetic construct
  source 1..19: note = Description of Artificial Sequence: Synthetic peptide; note = XENP021675 vhCDR2
EISTKAYNHATDYAESVKG

SEQ ID NO: 31868 - protein, 10 aa, synthetic construct
  source 1..10: note = Description of Artificial Sequence: Synthetic peptide; note = XENP021675 vhCDR3
LATWDWYFDV

SEQ ID NO: 31869 - protein, 218 aa, synthetic construct; identical to SEQ ID NO: 22359
  source 1..218: note = Description of Artificial Sequence: Synthetic polypeptide; note = XENP021675 7G8_H3.21_L1.11_Fab Light Chain

SEQ ID NO: 31870 - protein, 111 aa, synthetic construct; identical to SEQ ID NO: 22360
  source 1..111: note = Description of Artificial Sequence: Synthetic polypeptide; note = VL of XENP021675

SEQ ID NO: 31871 - protein, 15 aa, synthetic construct
  source 1..15: note = Description of Artificial Sequence: Synthetic peptide; note = XENP021675 vlCDR1
RASQSVDYDGDSYMN

SEQ ID NO: 31872 - protein, 7 aa, synthetic construct
  source 1..7: note = Description of Artificial Sequence: Synthetic peptide; note = XENP021675 vlCDR2
AASELES

SEQ ID NO: 31873 - protein, 9 aa, synthetic construct
  source 1..9: note = Description of Artificial Sequence: Synthetic peptide; note = XENP021675 vlCDR3
QQSNEDPFT

SEQ ID NO: 31874 - protein, 226 aa, synthetic construct; identical to SEQ ID NO: 31794
  source 1..226: note = Description of Artificial Sequence: Synthetic polypeptide; note = XENP021676 7G8_H3.22_L1.11_Fab Heavy Chain

SEQ ID NO: 31875 - protein, 121 aa, synthetic construct; identical to SEQ ID NO: 31795
  source 1..121: note = Description of Artificial Sequence: Synthetic polypeptide; note = VH of XENP021676

SEQ ID NO: 31876 - protein, 5 aa, synthetic construct
  source 1..5: note = Description of Artificial Sequence: Synthetic peptide; note = XENP021676 vhCDR1
DAWMD

SEQ ID NO: 31877 - protein, 19 aa, synthetic construct
  source 1..19: note = Description of Artificial Sequence: Synthetic peptide; note = XENP021676 vhCDR2
EISTKAYNHATDYAESVKG

SEQ ID NO: 31878 - protein, 10 aa, synthetic construct
  source 1..10: note = Description of Artificial Sequence: Synthetic peptide; note = XENP021676 vhCDR3
LATWDWYFDV

SEQ ID NO: 31879 - protein, 218 aa, synthetic construct; identical to SEQ ID NO: 22359
  source 1..218: note = Description of Artificial Sequence: Synthetic polypeptide; note = XENP021676 7G8_H3.22_L1.11_Fab Light Chain

SEQ ID NO: 31880 - protein, 111 aa, synthetic construct; identical to SEQ ID NO: 22360
  source 1..111: note = Description of Artificial Sequence: Synthetic polypeptide; note = VL of XENP021676

SEQ ID NO: 31881 - protein, 15 aa, synthetic construct
  source 1..15: note = Description of Artificial Sequence: Synthetic peptide; note = XENP021676 vlCDR1
RASQSVDYDGDSYMN

SEQ ID NO: 31882 - protein, 7 aa, synthetic construct
  source 1..7: note = Description of Artificial Sequence: Synthetic peptide; note = XENP021676 vlCDR2
AASELES

SEQ ID NO: 31883 - protein, 9 aa, synthetic construct
  source 1..9: note = Description of Artificial Sequence: Synthetic peptide; note = XENP021676 vlCDR3
QQSNEDPFT

SEQ ID NO: 31884 - protein, 226 aa, synthetic construct; identical to SEQ ID NO: 31804
  source 1..226: note = Description of Artificial Sequence: Synthetic polypeptide; note = XENP021677 7G8_H3.23_L1.11_Fab Heavy Chain

SEQ ID NO: 31885 - protein, 121 aa, synthetic construct; identical to SEQ ID NO: 22385
  source 1..121: note = Description of Artificial Sequence: Synthetic polypeptide; note = VH of XENP021677

SEQ ID NO: 31886 - protein, 5 aa, synthetic construct
  source 1..5: note = Description of Artificial Sequence: Synthetic peptide; note = XENP021677 vhCDR1
DAWMD

SEQ ID NO: 31887 - protein, 19 aa, synthetic construct
  source 1..19: note = Description of Artificial Sequence: Synthetic peptide; note = XENP021677 vhCDR2
EISTKANNHATYYAESVKG

SEQ ID NO: 31888 - protein, 10 aa, synthetic construct
  source 1..10: note = Description of Artificial Sequence: Synthetic peptide; note = XENP021677 vhCDR3
LATWDWYFDV

SEQ ID NO: 31889 - protein, 218 aa, synthetic construct; identical to SEQ ID NO: 22359
  source 1..218: note = Description of Artificial Sequence: Synthetic polypeptide; note = XENP021677 7G8_H3.23_L1.11_Fab Light Chain

SEQ ID NO: 31890 - protein, 111 aa, synthetic construct; identical to SEQ ID NO: 22360
  source 1..111: note = Description of Artificial Sequence: Synthetic polypeptide; note = VL of XENP021677

SEQ ID NO: 31891 - protein, 15 aa, synthetic construct
  source 1..15: note = Description of Artificial Sequence: Synthetic peptide; note = XENP021677 vlCDR1
RASQSVDYDGDSYMN

SEQ ID NO: 31892 - protein, 7 aa, synthetic construct
  source 1..7: note = Description of Artificial Sequence: Synthetic peptide; note = XENP021677 vlCDR2
AASELES

SEQ ID NO: 31893 - protein, 9 aa, synthetic construct
  source 1..9: note = Description of Artificial Sequence: Synthetic peptide; note = XENP021677 vlCDR3
QQSNEDPFT

SEQ ID NO: 31894 - protein, 226 aa, synthetic construct; identical to SEQ ID NO: 31734
  source 1..226: note = Description of Artificial Sequence: Synthetic polypeptide; note = XENP021678 7G8_H3.18_L1.13_Fab Heavy Chain

SEQ ID NO: 31895 - protein, 121 aa, synthetic construct; identical to SEQ ID NO: 22325
  source 1..121: note = Description of Artificial Sequence: Synthetic polypeptide; note = VH of XENP021678

SEQ ID NO: 31896 - protein, 5 aa, synthetic construct
  source 1..5: note = Description of Artificial Sequence: Synthetic peptide; note = XENP021678 vhCDR1
DAWMD

SEQ ID NO: 31897 - protein, 19 aa, synthetic construct
  source 1..19: note = Description of Artificial Sequence: Synthetic peptide; note = XENP021678 vhCDR2
EISTKANNHATYYAESVKG

SEQ ID NO: 31898 - protein, 10 aa, synthetic construct
  source 1..10: note = Description of Artificial Sequence: Synthetic peptide; note = XENP021678 vhCDR3
LATWDWYFDV

SEQ ID NO: 31899 - protein, 218 aa, synthetic construct; identical to SEQ ID NO: 22419
  source 1..218: note = Description of Artificial Sequence: Synthetic polypeptide; note = XENP021678 7G8_H3.18_L1.13_Fab Light Chain

SEQ ID NO: 31900 - protein, 111 aa, synthetic construct; identical to SEQ ID NO: 22420
  source 1..111: note = Description of Artificial Sequence: Synthetic polypeptide; note = VL of XENP021678

SEQ ID NO: 31901 - protein, 15 aa, synthetic construct
  source 1..15: note = Description of Artificial Sequence: Synthetic peptide; note = XENP021678 vlCDR1
RASQSVDHDGDSYMN

SEQ ID NO: 31902 - protein, 7 aa, synthetic construct
  source 1..7: note = Description of Artificial Sequence: Synthetic peptide; note = XENP021678 vlCDR2
AASELES

SEQ ID NO: 31903 - protein, 9 aa, synthetic construct
  source 1..9: note = Description of Artificial Sequence: Synthetic peptide; note = XENP021678 vlCDR3
QQSNEDPFT

SEQ ID NO: 31904 - protein, 226 aa, synthetic construct; identical to SEQ ID NO: 31744
  source 1..226: note = Description of Artificial Sequence: Synthetic polypeptide; note = XENP021679 7G8_H3.15_L1.13_Fab Heavy Chain

SEQ ID NO: 31905 - protein, 121 aa, synthetic construct; identical to SEQ ID NO: 22365
  source 1..121: note = Description of Artificial Sequence: Synthetic polypeptide; note = VH of XENP021679

SEQ ID NO: 31906 - protein, 5 aa, synthetic construct
  source 1..5: note = Description of Artificial Sequence: Synthetic peptide; note = XENP021679 vhCDR1
DAWMD

SEQ ID NO: 31907 - protein, 19 aa, synthetic construct
  source 1..19: note = Description of Artificial Sequence: Synthetic peptide; note = XENP021679 vhCDR2
EISTKANNHATYYAESVKG

SEQ ID NO: 31908 - protein, 10 aa, synthetic construct
  source 1..10: note = Description of Artificial Sequence: Synthetic peptide; note = XENP021679 vhCDR3
LATWDWYFDV

SEQ ID NO: 31909 - protein, 218 aa, synthetic construct; identical to SEQ ID NO: 22419
  source 1..218: note = Description of Artificial Sequence: Synthetic polypeptide; note = XENP021679 7G8_H3.15_L1.13_Fab Light Chain

SEQ ID NO: 31910 - protein, 111 aa, synthetic construct; identical to SEQ ID NO: 22420
  source 1..111: note = Description of Artificial Sequence: Synthetic polypeptide; note = VL of XENP021679

SEQ ID NO: 31911 - protein, 15 aa, synthetic construct
  source 1..15: note = Description of Artificial Sequence: Synthetic peptide; note = XENP021679 vlCDR1
RASQSVDHDGDSYMN

SEQ ID NO: 31912 - protein, 7 aa, synthetic construct
  source 1..7: note = Description of Artificial Sequence: Synthetic peptide; note = XENP021679 vlCDR2
AASELES

SEQ ID NO: 31913 - protein, 9 aa, synthetic construct
  source 1..9: note = Description of Artificial Sequence: Synthetic peptide; note = XENP021679 vlCDR3
QQSNEDPFT

SEQ ID NO: 31914 - protein, 226 aa, synthetic construct; identical to SEQ ID NO: 31754
  source 1..226: note = Description of Artificial Sequence: Synthetic polypeptide; note = XENP021680 7G8_H3.19_L1.13_Fab Heavy Chain

SEQ ID NO: 31915 - protein, 121 aa, synthetic construct; identical to SEQ ID NO: 31755
  source 1..121: note = Description of Artificial Sequence: Synthetic polypeptide; note = VH of XENP021680

SEQ ID NO: 31916 - protein, 5 aa, synthetic construct
  source 1..5: note = Description of Artificial Sequence: Synthetic peptide; note = XENP021680 vhCDR1
DAWMD

SEQ ID NO: 31917 - protein, 19 aa, synthetic construct
  source 1..19: note = Description of Artificial Sequence: Synthetic peptide; note = XENP021680 vhCDR2
EIRTKAYNHATYYAESVKG

SEQ ID NO: 31918 - protein, 10 aa, synthetic construct
  source 1..10: note = Description of Artificial Sequence: Synthetic peptide; note = XENP021680 vhCDR3
LATWDWYFDV

SEQ ID NO: 31919 - protein, 218 aa, synthetic construct; identical to SEQ ID NO: 22419
  source 1..218: note = Description of Artificial Sequence: Synthetic polypeptide; note = XENP021680 7G8_H3.19_L1.13_Fab Light Chain

SEQ ID NO: 31920 - protein, 111 aa, synthetic construct; identical to SEQ ID NO: 22420
  source 1..111: note = Description of Artificial Sequence: Synthetic polypeptide; note = VL of XENP021680

SEQ ID NO: 31921 - protein, 15 aa, synthetic construct
  source 1..15: note = Description of Artificial Sequence: Synthetic peptide; note = XENP021680 vlCDR1
RASQSVDHDGDSYMN

SEQ ID NO: 31922 - protein, 7 aa, synthetic construct
  source 1..7: note = Description of Artificial Sequence: Synthetic peptide; note = XENP021680 vlCDR2
AASELES

SEQ ID NO: 31923 - protein, 9 aa, synthetic construct
  source 1..9: note = Description of Artificial Sequence: Synthetic peptide; note = XENP021680 vlCDR3
QQSNEDPFT

SEQ ID NO: 31924 - protein, 226 aa, synthetic construct; identical to SEQ ID NO: 31764
  source 1..226: note = Description of Artificial Sequence: Synthetic polypeptide; note = XENP021681 7G8_H3.17_L1.13_Fab Heavy Chain

SEQ ID NO: 31925 - protein, 121 aa, synthetic construct; identical to SEQ ID NO: 31765
  source 1..121: note = Description of Artificial Sequence: Synthetic polypeptide; note = VH of XENP021681

SEQ ID NO: 31926 - protein, 5 aa, synthetic construct
  source 1..5: note = Description of Artificial Sequence: Synthetic peptide; note = XENP021681 vhCDR1
DAWMD

SEQ ID NO: 31927 - protein, 19 aa, synthetic construct
  source 1..19: note = Description of Artificial Sequence: Synthetic peptide; note = XENP021681 vhCDR2
EIRTKAYNHATYYAESVKG

SEQ ID NO: 31928 - protein, 10 aa, synthetic construct
  source 1..10: note = Description of Artificial Sequence: Synthetic peptide; note = XENP021681 vhCDR3
LATWDWYFDV

SEQ ID NO: 31929 - protein, 218 aa, synthetic construct; identical to SEQ ID NO: 22419
  source 1..218: note = Description of Artificial Sequence: Synthetic polypeptide; note = XENP021681 7G8_H3.17_L1.13_Fab Light Chain

SEQ ID NO: 31930 - protein, 111 aa, synthetic construct; identical to SEQ ID NO: 22420
  source 1..111: note = Description of Artificial Sequence: Synthetic polypeptide; note = VL of XENP021681

SEQ ID NO: 31931 - protein, 15 aa, synthetic construct
  source 1..15: note = Description of Artificial Sequence: Synthetic peptide; note = XENP021681 vlCDR1
RASQSVDHDGDSYMN

SEQ ID NO: 31932 - protein, 7 aa, synthetic construct
  source 1..7: note = Description of Artificial Sequence: Synthetic peptide; note = XENP021681 vlCDR2
AASELES

SEQ ID NO: 31933 - protein, 9 aa, synthetic construct
  source 1..9: note = Description of Artificial Sequence: Synthetic peptide; note = XENP021681 vlCDR3
QQSNEDPFT

SEQ ID NO: 31934 - protein, 226 aa, synthetic construct; identical to SEQ ID NO: 31774
  source 1..226: note = Description of Artificial Sequence: Synthetic polypeptide; note = XENP021682 7G8_H3.16_L1.13_Fab Heavy Chain

SEQ ID NO: 31935 - protein, 121 aa, synthetic construct; identical to SEQ ID NO: 31775
  source 1..121: note = Description of Artificial Sequence: Synthetic polypeptide; note = VH of XENP021682

SEQ ID NO: 31936 - protein, 5 aa, synthetic construct
  source 1..5: note = Description of Artificial Sequence: Synthetic peptide; note = XENP021682 vhCDR1
DAWMD

SEQ ID NO: 31937 - protein, 19 aa, synthetic construct
  source 1..19: note = Description of Artificial Sequence: Synthetic peptide; note = XENP021682 vhCDR2
EIRTKANNHATDYAESVKG

SEQ ID NO: 31938 - protein, 10 aa, synthetic construct
  source 1..10: note = Description of Artificial Sequence: Synthetic peptide; note = XENP021682 vhCDR3
LATWDWYFDV

SEQ ID NO: 31939 - protein, 218 aa, synthetic construct; identical to SEQ ID NO: 22419
  source 1..218: note = Description of Artificial Sequence: Synthetic polypeptide; note = XENP021682 7G8_H3.16_L1.13_Fab Light Chain

SEQ ID NO: 31940 - protein, 111 aa, synthetic construct; identical to SEQ ID NO: 22420
  source 1..111: note = Description of Artificial Sequence: Synthetic polypeptide; note = VL of XENP021682

SEQ ID NO: 31941 - protein, 15 aa, synthetic construct
  source 1..15: note = Description of Artificial Sequence: Synthetic peptide; note = XENP021682 vlCDR1
RASQSVDHDGDSYMN

SEQ ID NO: 31942 - protein, 7 aa, synthetic construct
  source 1..7: note = Description of Artificial Sequence: Synthetic peptide; note = XENP021682 vlCDR2
AASELES

SEQ ID NO: 31943 - protein, 9 aa, synthetic construct
  source 1..9: note = Description of Artificial Sequence: Synthetic peptide; note = XENP021682 vlCDR3
QQSNEDPFT

SEQ ID NO: 31944 - protein, 226 aa, synthetic construct; identical to SEQ ID NO: 31784
  source 1..226: note = Description of Artificial Sequence: Synthetic polypeptide; note = XENP021683 7G8_H3.21_L1.13_Fab Heavy Chain

SEQ ID NO: 31945 - protein, 121 aa, synthetic construct; identical to SEQ ID NO: 31785
  source 1..121: note = Description of Artificial Sequence: Synthetic polypeptide; note = VH of XENP021683

SEQ ID NO: 31946 - protein, 5 aa, synthetic construct
  source 1..5: note = Description of Artificial Sequence: Synthetic peptide; note = XENP021683 vhCDR1
DAWMD

SEQ ID NO: 31947 - protein, 19 aa, synthetic construct
  source 1..19: note = Description of Artificial Sequence: Synthetic peptide; note = XENP021683 vhCDR2
EISTKAYNHATDYAESVKG

SEQ ID NO: 31948 - protein, 10 aa, synthetic construct
  source 1..10: note = Description of Artificial Sequence: Synthetic peptide; note = XENP021683 vhCDR3
LATWDWYFDV

SEQ ID NO: 31949 - protein, 218 aa, synthetic construct; identical to SEQ ID NO: 22419
  source 1..218: note = Description of Artificial Sequence: Synthetic polypeptide; note = XENP021683 7G8_H3.21_L1.13_Fab Light Chain

SEQ ID NO: 31950 - protein, 111 aa, synthetic construct; identical to SEQ ID NO: 22420
  source 1..111: note = Description of Artificial Sequence: Synthetic polypeptide; note = VL of XENP021683

SEQ ID NO: 31951 - protein, 15 aa, synthetic construct
  source 1..15: note = Description of Artificial Sequence: Synthetic peptide; note = XENP021683 vlCDR1
RASQSVDHDGDSYMN

SEQ ID NO: 31952 - protein, 7 aa, synthetic construct
  source 1..7: note = Description of Artificial Sequence: Synthetic peptide; note = XENP021683 vlCDR2
AASELES

SEQ ID NO: 31953 - protein, 9 aa, synthetic construct
  source 1..9: note = Description of Artificial Sequence: Synthetic peptide; note = XENP021683 vlCDR3
QQSNEDPFT

SEQ ID NO: 31954 - protein, 226 aa, synthetic construct; identical to SEQ ID NO: 31794
  source 1..226: note = Description of Artificial Sequence: Synthetic polypeptide; note = XENP021684 7G8_H3.22_L1.13_Fab Heavy Chain

SEQ ID NO: 31955 - protein, 121 aa, synthetic construct; identical to SEQ ID NO: 31795
  source 1..121: note = Description of Artificial Sequence: Synthetic polypeptide; note = VH of XENP021684

SEQ ID NO: 31956 - protein, 5 aa, synthetic construct
  source 1..5: note = Description of Artificial Sequence: Synthetic peptide; note = XENP021684 vhCDR1
DAWMD

SEQ ID NO: 31957 - protein, 19 aa, synthetic construct
  source 1..19: note = Description of Artificial Sequence: Synthetic peptide; note = XENP021684 vhCDR2
EISTKAYNHATDYAESVKG

SEQ ID NO: 31958 - protein, 10 aa, synthetic construct
  source 1..10: note = Description of Artificial Sequence: Synthetic peptide; note = XENP021684 vhCDR3
LATWDWYFDV

SEQ ID NO: 31959 - protein, 218 aa, synthetic construct; identical to SEQ ID NO: 22419
  source 1..218: note = Description of Artificial Sequence: Synthetic polypeptide; note = XENP021684 7G8_H3.22_L1.13_Fab Light Chain

SEQ ID NO: 31960 - protein, 111 aa, synthetic construct; identical to SEQ ID NO: 22420
  source 1..111: note = Description of Artificial Sequence: Synthetic polypeptide; note = VL of XENP021684

SEQ ID NO: 31961 - protein, 15 aa, synthetic construct
  source 1..15: note = Description of Artificial Sequence: Synthetic peptide; note = XENP021684 vlCDR1
RASQSVDHDGDSYMN

SEQ ID NO: 31962 - protein, 7 aa, synthetic construct
  source 1..7: note = Description of Artificial Sequence: Synthetic peptide; note = XENP021684 vlCDR2
AASELES

SEQ ID NO: 31963 - protein, 9 aa, synthetic construct
  source 1..9: note = Description of Artificial Sequence: Synthetic peptide; note = XENP021684 vlCDR3
QQSNEDPFT

SEQ ID NO: 31964 - protein, 226 aa, synthetic construct; identical to SEQ ID NO: 31804
  source 1..226: note = Description of Artificial Sequence: Synthetic polypeptide; note = XENP021685 7G8_H3.23_L1.13_Fab Heavy Chain

SEQ ID NO: 31965 - protein, 121 aa, synthetic construct; identical to SEQ ID NO: 22385
  source 1..121: note = Description of Artificial Sequence: Synthetic polypeptide; note = VH of XENP021685

SEQ ID NO: 31966 - protein, 5 aa, synthetic construct
  source 1..5: note = Description of Artificial Sequence: Synthetic peptide; note = XENP021685 vhCDR1
DAWMD

SEQ ID NO: 31967 - protein, 19 aa, synthetic construct
  source 1..19: note = Description of Artificial Sequence: Synthetic peptide; note = XENP021685 vhCDR2
EISTKANNHATYYAESVKG

SEQ ID NO: 31968 - protein, 10 aa, synthetic construct
  source 1..10: note = Description of Artificial Sequence: Synthetic peptide; note = XENP021685 vhCDR3
LATWDWYFDV

SEQ ID NO: 31969 - protein, 218 aa, synthetic construct; identical to SEQ ID NO: 22419
  source 1..218: note = Description of Artificial Sequence: Synthetic polypeptide; note = XENP021685 7G8_H3.23_L1.13_Fab Light Chain

SEQ ID NO: 31970 - protein, 111 aa, synthetic construct; identical to SEQ ID NO: 22420
  source 1..111: note = Description of Artificial Sequence: Synthetic polypeptide; note = VL of XENP021685

SEQ ID NO: 31971 - protein, 15 aa, synthetic construct
  source 1..15: note = Description of Artificial Sequence: Synthetic peptide; note = XENP021685 vlCDR1
RASQSVDHDGDSYMN

SEQ ID NO: 31972 - protein, 7 aa, synthetic construct
  source 1..7: note = Description of Artificial Sequence: Synthetic peptide; note = XENP021685 vlCDR2
AASELES

SEQ ID NO: 31973 - protein, 9 aa, synthetic construct
  source 1..9: note = Description of Artificial Sequence: Synthetic peptide; note = XENP021685 vlCDR3
QQSNEDPFT

SEQ ID NO: 31974 - protein, 226 aa, synthetic construct; identical to SEQ ID NO: 31734
  source 1..226: note = Description of Artificial Sequence: Synthetic polypeptide; note = XENP021686 7G8_H3.18_L1.15_Fab Heavy Chain

SEQ ID NO: 31975 - protein, 121 aa, synthetic construct; identical to SEQ ID NO: 22325
  source 1..121: note = Description of Artificial Sequence: Synthetic polypeptide; note = VH of XENP021686

SEQ ID NO: 31976 - protein, 5 aa, synthetic construct
  source 1..5: note = Description of Artificial Sequence: Synthetic peptide; note = XENP021686 vhCDR1
DAWMD

SEQ ID NO: 31977 - protein, 19 aa, synthetic construct
  source 1..19: note = Description of Artificial Sequence: Synthetic peptide; note = XENP021686 vhCDR2
EISTKANNHATYYAESVKG

SEQ ID NO: 31978 - protein, 10 aa, synthetic construct
  source 1..10: note = Description of Artificial Sequence: Synthetic peptide; note = XENP021686 vhCDR3
LATWDWYFDV

SEQ ID NO: 31979 - protein, 218 aa, synthetic construct
  source 1..218: note = Description of Artificial Sequence: Synthetic polypeptide; note = XENP021686 7G8_H3.18_L1.15_Fab Light Chain
DTVLTQSPSSLSASVGDRVTITCRASQSVDHDDDSYMNWYQQKPGKPPKLLIYAASELESGIPARLSGSGSGTDFTLTISSLQPEDFATYYCQQSNEDPFTFGSGTKLEIKRTVAAPSVFIFPPSDEQLKSGTASVVCLLNNFYPREAKVQWKVDNALQSGNSQESVTEQDSKDSTYSLSSTLTLSKADYEKHKVYACEVTHQGLSSPVTKSFNRGEC

SEQ ID NO: 31980 - protein, 111 aa, synthetic construct
  source 1..111: note = Description of Artificial Sequence: Synthetic polypeptide; note = VL of XENP021686
DTVLTQSPSSLSASVGDRVTITCRASQSVDHDDDSYMNWYQQKPGKPPKLLIYAASELESGIPARLSGSGSGTDFTLTISSLQPEDFATYYCQQSNEDPFTFGSGTKLEIK

SEQ ID NO: 31981 - protein, 15 aa, synthetic construct
  source 1..15: note = Description of Artificial Sequence: Synthetic peptide; note = XENP021686 vlCDR1
RASQSVDHDDDSYMN

SEQ ID NO: 31982 - protein, 7 aa, synthetic construct
  source 1..7: note = Description of Artificial Sequence: Synthetic peptide; note = XENP021686 vlCDR2
AASELES

SEQ ID NO: 31983 - protein, 9 aa, synthetic construct
  source 1..9: note = Description of Artificial Sequence: Synthetic peptide; note = XENP021686 vlCDR3
QQSNEDPFT

SEQ ID NO: 31984 - protein, 226 aa, synthetic construct; identical to SEQ ID NO: 31744
  source 1..226: note = Description of Artificial Sequence: Synthetic polypeptide; note = XENP021687 7G8_H3.15_L1.15_Fab Heavy Chain

SEQ ID NO: 31985 - protein, 121 aa, synthetic construct; identical to SEQ ID NO: 22365
  source 1..121: note = Description of Artificial Sequence: Synthetic polypeptide; note = VH of XENP021687

SEQ ID NO: 31986 - protein, 5 aa, synthetic construct
  source 1..5: note = Description of Artificial Sequence: Synthetic peptide; note = XENP021687 vhCDR1
DAWMD

SEQ ID NO: 31987 - protein, 19 aa, synthetic construct
  source 1..19: note = Description of Artificial Sequence: Synthetic peptide; note = XENP021687 vhCDR2
EISTKANNHATYYAESVKG

SEQ ID NO: 31988 - protein, 10 aa, synthetic construct
  source 1..10: note = Description of Artificial Sequence: Synthetic peptide; note = XENP021687 vhCDR3
LATWDWYFDV

SEQ ID NO: 31989 - protein, 218 aa, synthetic construct; identical to SEQ ID NO: 31979
  source 1..218: note = Description of Artificial Sequence: Synthetic polypeptide; note = XENP021687 7G8_H3.15_L1.15_Fab Light Chain

SEQ ID NO: 31990 - protein, 111 aa, synthetic construct; identical to SEQ ID NO: 31980
  source 1..111: note = Description of Artificial Sequence: Synthetic polypeptide; note = VL of XENP021687

SEQ ID NO: 31991 - protein, 15 aa, synthetic construct
  source 1..15: note = Description of Artificial Sequence: Synthetic peptide; note = XENP021687 vlCDR1
RASQSVDHDDDSYMN

SEQ ID NO: 31992 - protein, 7 aa, synthetic construct
  source 1..7: note = Description of Artificial Sequence: Synthetic peptide; note = XENP021687 vlCDR2
AASELES

SEQ ID NO: 31993 - protein, 9 aa, synthetic construct
  source 1..9: note = Description of Artificial Sequence: Synthetic peptide; note = XENP021687 vlCDR3
QQSNEDPFT

SEQ ID NO: 31994 - protein, 226 aa, synthetic construct; identical to SEQ ID NO: 31754
  source 1..226: note = Description of Artificial Sequence: Synthetic polypeptide; note = XENP021688 7G8_H3.19_L1.15_Fab Heavy Chain

SEQ ID NO: 31995 - protein, 121 aa, synthetic construct; identical to SEQ ID NO: 31755
  source 1..121: note = Description of Artificial Sequence: Synthetic polypeptide; note = VH of XENP021688

SEQ ID NO: 31996 - protein, 5 aa, synthetic construct
  source 1..5: note = Description of Artificial Sequence: Synthetic peptide; note = XENP021688 vhCDR1
DAWMD

SEQ ID NO: 31997 - protein, 19 aa, synthetic construct
  source 1..19: note = Description of Artificial Sequence: Synthetic peptide; note = XENP021688 vhCDR2
EIRTKAYNHATYYAESVKG

SEQ ID NO: 31998 - protein, 10 aa, synthetic construct
  source 1..10: note = Description of Artificial Sequence: Synthetic peptide; note = XENP021688 vhCDR3
LATWDWYFDV

SEQ ID NO: 31999 - protein, 218 aa, synthetic construct; identical to SEQ ID NO: 31979
  source 1..218: note = Description of Artificial Sequence: Synthetic polypeptide; note = XENP021688 7G8_H3.19_L1.15_Fab Light Chain

SEQ ID NO: 32000 - protein, 111 aa, synthetic construct; identical to SEQ ID NO: 31980
  source 1..111: note = Description of Artificial Sequence: Synthetic polypeptide; note = VL of XENP021688

SEQ ID NO: 32001 - protein, 15 aa, synthetic construct
  source 1..15: note = Description of Artificial Sequence: Synthetic peptide; note = XENP021688 vlCDR1
RASQSVDHDDDSYMN

SEQ ID NO: 32002 - protein, 7 aa, synthetic construct
  source 1..7: note = Description of Artificial Sequence: Synthetic peptide; note = XENP021688 vlCDR2
AASELES

SEQ ID NO: 32003 - protein, 9 aa, synthetic construct
  source 1..9: note = Description of Artificial Sequence: Synthetic peptide; note = XENP021688 vlCDR3
QQSNEDPFT

SEQ ID NO: 32004 - protein, 226 aa, synthetic construct; identical to SEQ ID NO: 31764
  source 1..226: note = Description of Artificial Sequence: Synthetic polypeptide; note = XENP021689 7G8_H3.17_L1.15_Fab Heavy Chain

SEQ ID NO: 32005 - protein, 121 aa, synthetic construct; identical to SEQ ID NO: 31765
  source 1..121: note = Description of Artificial Sequence: Synthetic polypeptide; note = VH of XENP021689

SEQ ID NO: 32006 - protein, 5 aa, synthetic construct
  source 1..5: note = Description of Artificial Sequence: Synthetic peptide; note = XENP021689 vhCDR1
DAWMD

SEQ ID NO: 32007 - protein, 19 aa, synthetic construct
  source 1..19: note = Description of Artificial Sequence: Synthetic peptide; note = XENP021689 vhCDR2
EIRTKAYNHATYYAESVKG

SEQ ID NO: 32008 - protein, 10 aa, synthetic construct
  source 1..10: note = Description of Artificial Sequence: Synthetic peptide; note = XENP021689 vhCDR3
LATWDWYFDV

SEQ ID NO: 32009 - protein, 218 aa, synthetic construct; identical to SEQ ID NO: 31979
  source 1..218: note = Description of Artificial Sequence: Synthetic polypeptide; note = XENP021689 7G8_H3.17_L1.15_Fab Light Chain

SEQ ID NO: 32010 - protein, 111 aa, synthetic construct; identical to SEQ ID NO: 31980
  source 1..111: note = Description of Artificial Sequence: Synthetic polypeptide; note = VL of XENP021689

SEQ ID NO: 32011 - protein, 15 aa, synthetic construct
  source 1..15: note = Description of Artificial Sequence: Synthetic peptide; note = XENP021689 vlCDR1
RASQSVDHDDDSYMN

SEQ ID NO: 32012 - protein, 7 aa, synthetic construct
  source 1..7: note = Description of Artificial Sequence: Synthetic peptide; note = XENP021689 vlCDR2
AASELES

SEQ ID NO: 32013 - protein, 9 aa, synthetic construct
  source 1..9: note = Description of Artificial Sequence: Synthetic peptide; note = XENP021689 vlCDR3
QQSNEDPFT

SEQ ID NO: 32014 - protein, 226 aa, synthetic construct; identical to SEQ ID NO: 31774
  source 1..226: note = Description of Artificial Sequence: Synthetic polypeptide; note = XENP021690 7G8_H3.16_L1.15_Fab Heavy Chain

SEQ ID NO: 32015 - protein, 121 aa, synthetic construct; identical to SEQ ID NO: 31775
  source 1..121: note = Description of Artificial Sequence: Synthetic polypeptide; note = VH of XENP021690

SEQ ID NO: 32016 - protein, 5 aa, synthetic construct
  source 1..5: note = Description of Artificial Sequence: Synthetic peptide; note = XENP021690 vhCDR1
DAWMD

SEQ ID NO: 32017 - protein, 19 aa, synthetic construct
  source 1..19: note = Description of Artificial Sequence: Synthetic peptide; note = XENP021690 vhCDR2
EIRTKANNHATDYAESVKG

SEQ ID NO: 32018 - protein, 10 aa, synthetic construct
  source 1..10: note = Description of Artificial Sequence: Synthetic peptide; note = XENP021690 vhCDR3
LATWDWYFDV

SEQ ID NO: 32019 - protein, 218 aa, synthetic construct; identical to SEQ ID NO: 31979
  source 1..218: note = Description of Artificial Sequence: Synthetic polypeptide; note = XENP021690 7G8_H3.16_L1.15_Fab Light Chain

SEQ ID NO: 32020 - protein, 111 aa, synthetic construct; identical to SEQ ID NO: 31980
  source 1..111: note = Description of Artificial Sequence: Synthetic polypeptide; note = VL of XENP021690

SEQ ID NO: 32021 - protein, 15 aa, synthetic construct
  source 1..15: note = Description of Artificial Sequence: Synthetic peptide; note = XENP021690 vlCDR1
RASQSVDHDDDSYMN

SEQ ID NO: 32022 - protein, 7 aa, synthetic construct
  source 1..7: note = Description of Artificial Sequence: Synthetic peptide; note = XENP021690 vlCDR2
AASELES

SEQ ID NO: 32023 - protein, 9 aa, synthetic construct
  source 1..9: note = Description of Artificial Sequence: Synthetic peptide; note = XENP021690 vlCDR3
QQSNEDPFT

SEQ ID NO: 32024 - protein, 226 aa, synthetic construct; identical to SEQ ID NO: 31784
  source 1..226: note = Description of Artificial Sequence: Synthetic polypeptide; note = XENP021691 7G8_H3.21_L1.15_Fab Heavy Chain

SEQ ID NO: 32025 - protein, 121 aa, synthetic construct; identical to SEQ ID NO: 31785
  source 1..121: note = Description of Artificial Sequence: Synthetic polypeptide; note = VH of XENP021691

SEQ ID NO: 32026 - protein, 5 aa, synthetic construct
  source 1..5: note = Description of Artificial Sequence: Synthetic peptide; note = XENP021691 vhCDR1
DAWMD

SEQ ID NO: 32027 - protein, 19 aa, synthetic construct
  source 1..19: note = Description of Artificial Sequence: Synthetic peptide; note = XENP021691 vhCDR2
EISTKAYNHATDYAESVKG

SEQ ID NO: 32028 - protein, 10 aa, synthetic construct
  source 1..10: note = Description of Artificial Sequence: Synthetic peptide; note = XENP021691 vhCDR3
LATWDWYFDV

SEQ ID NO: 32029 - protein, 218 aa, synthetic construct; identical to SEQ ID NO: 31979
  source 1..218: note = Description of Artificial Sequence: Synthetic polypeptide; note = XENP021691 7G8_H3.21_L1.15_Fab Light Chain

SEQ ID NO: 32030 - protein, 111 aa, synthetic construct; identical to SEQ ID NO: 31980
  source 1..111: note = Description of Artificial Sequence: Synthetic polypeptide; note = VL of XENP021691

SEQ ID NO: 32031 - protein, 15 aa, synthetic construct
  source 1..15: note = Description of Artificial Sequence: Synthetic peptide; note = XENP021691 vlCDR1
RASQSVDHDDDSYMN

SEQ ID NO: 32032 - protein, 7 aa, synthetic construct
  source 1..7: note = Description of Artificial Sequence: Synthetic peptide; note = XENP021691 vlCDR2
AASELES

SEQ ID NO: 32033 - protein, 9 aa, synthetic construct
  source 1..9: note = Description of Artificial Sequence: Synthetic peptide; note = XENP021691 vlCDR3
QQSNEDPFT

SEQ ID NO: 32034 - protein, 226 aa, synthetic construct; identical to SEQ ID NO: 31794
  source 1..226: note = Description of Artificial Sequence: Synthetic polypeptide; note = XENP021692 7G8_H3.22_L1.15_Fab Heavy Chain

SEQ ID NO: 32035 - protein, 121 aa, synthetic construct; identical to SEQ ID NO: 31795
  source 1..121: note = Description of Artificial Sequence: Synthetic polypeptide; note = VH of XENP021692

SEQ ID NO: 32036 - protein, 5 aa, synthetic construct
  source 1..5: note = Description of Artificial Sequence: Synthetic peptide; note = XENP021692 vhCDR1
DAWMD

SEQ ID NO: 32037 - protein, 19 aa, synthetic construct
  source 1..19: note = Description of Artificial Sequence: Synthetic peptide; note = XENP021692 vhCDR2
EISTKAYNHATDYAESVKG

SEQ ID NO: 32038 - protein, 10 aa, synthetic construct
  source 1..10: note = Description of Artificial Sequence: Synthetic peptide; note = XENP021692 vhCDR3
LATWDWYFDV

SEQ ID NO: 32039 - protein, 218 aa, synthetic construct; identical to SEQ ID NO: 31979
  source 1..218: note = Description of Artificial Sequence: Synthetic polypeptide; note = XENP021692 7G8_H3.22_L1.15_Fab Light Chain

SEQ ID NO: 32040 - protein, 111 aa, synthetic construct; identical to SEQ ID NO: 31980
  source 1..111: note = Description of Artificial Sequence: Synthetic polypeptide; note = VL of XENP021692

SEQ ID NO: 32041 - protein, 15 aa, synthetic construct
  source 1..15: note = Description of Artificial Sequence: Synthetic peptide; note = XENP021692 vlCDR1
RASQSVDHDDDSYMN

SEQ ID NO: 32042 - protein, 7 aa, synthetic construct
  source 1..7: note = Description of Artificial Sequence: Synthetic peptide; note = XENP021692 vlCDR2
AASELES

SEQ ID NO: 32043 - protein, 9 aa, synthetic construct
  source 1..9: note = Description of Artificial Sequence: Synthetic peptide; note = XENP021692 vlCDR3
QQSNEDPFT

SEQ ID NO: 32044 - protein, 226 aa, synthetic construct; identical to SEQ ID NO: 31804
  source 1..226: note = Description of Artificial Sequence: Synthetic polypeptide; note = XENP021693 7G8_H3.23_L1.15_Fab Heavy Chain

SEQ ID NO: 32045 - protein, 121 aa, synthetic construct; identical to SEQ ID NO: 22385
  source 1..121: note = Description of Artificial Sequence: Synthetic polypeptide; note = VH of XENP021693

SEQ ID NO: 32046 - protein, 5 aa, synthetic construct
  source 1..5: note = Description of Artificial Sequence: Synthetic peptide; note = XENP021693 vhCDR1
DAWMD

SEQ ID NO: 32047 - protein, 19 aa, synthetic construct
  source 1..19: note = Description of Artificial Sequence: Synthetic peptide; note = XENP021693 vhCDR2
EISTKANNHATYYAESVKG

SEQ ID NO: 32048 - protein, 10 aa, synthetic construct
  source 1..10: note = Description of Artificial Sequence: Synthetic peptide; note = XENP021693 vhCDR3
LATWDWYFDV

SEQ ID NO: 32049 - protein, 218 aa, synthetic construct; identical to SEQ ID NO: 31979
  source 1..218: note = Description of Artificial Sequence: Synthetic polypeptide; note = XENP021693 7G8_H3.23_L1.15_Fab Light Chain

SEQ ID NO: 32050 - protein, 111 aa, synthetic construct; identical to SEQ ID NO: 31980
  source 1..111: note = Description of Artificial Sequence: Synthetic polypeptide; note = VL of XENP021693

SEQ ID NO: 32051 - protein, 15 aa, synthetic construct
  source 1..15: note = Description of Artificial Sequence: Synthetic peptide; note = XENP021693 vlCDR1
RASQSVDHDDDSYMN

SEQ ID NO: 32052 - protein, 7 aa, synthetic construct
  source 1..7: note = Description of Artificial Sequence: Synthetic peptide; note = XENP021693 vlCDR2
AASELES

SEQ ID NO: 32053 - protein, 9 aa, synthetic construct
  source 1..9: note = Description of Artificial Sequence: Synthetic peptide; note = XENP021693 vlCDR3
QQSNEDPFT

SEQ ID NO: 32054 - protein, 226 aa, synthetic construct; identical to SEQ ID NO: 28934
  source 1..226: note = Description of Artificial Sequence: Synthetic polypeptide; note = XENP021694 7G8_H3_L1.9_Fab Heavy Chain

SEQ ID NO: 32055 - protein, 121 aa, synthetic construct; identical to SEQ ID NO: 17806
  source 1..121: note = Description of Artificial Sequence: Synthetic polypeptide; note = VH of XENP021694

SEQ ID NO: 32056 - protein, 5 aa, synthetic construct
  source 1..5: note = Description of Artificial Sequence: Synthetic peptide; note = XENP021694 vhCDR1
DAWMD

SEQ ID NO: 32057 - protein, 19 aa, synthetic construct
  source 1..19: note = Description of Artificial Sequence: Synthetic peptide; note = XENP021694 vhCDR2
EIRTKANNHATYYAESVKG

SEQ ID NO: 32058 - protein, 10 aa, synthetic construct
  source 1..10: note = Description of Artificial Sequence: Synthetic peptide; note = XENP021694 vhCDR3
LANWDWYFDV

SEQ ID NO: 32059 - protein, 218 aa, synthetic construct
  source 1..218: note = Description of Artificial Sequence: Synthetic polypeptide; note = XENP021694 7G8_H3_L1.9_Fab Light Chain
DTVLTQSPSSLSASVGDRVTITCRASQSVDHDGDSYMNWYQQKPGKPPKLLIYAASNLESGIPARLSGSGSGTDFTLTISSLQPEDFATYYCQQSNEDPFTFGSGTKLEIKRTVAAPSVFIFPPSDEQLKSGTASVVCLLNNFYPREAKVQWKVDNALQSGNSQESVTEQDSKDSTYSLSSTLTLSKADYEKHKVYACEVTHQGLSSPVTKSFNRGEC

SEQ ID NO: 32060 - protein, 111 aa, synthetic construct
  source 1..111: note = Description of Artificial Sequence: Synthetic polypeptide; note = VL of XENP021694
DTVLTQSPSSLSASVGDRVTITCRASQSVDHDGDSYMNWYQQKPGKPPKLLIYAASNLESGIPARLSGSGSGTDFTLTISSLQPEDFATYYCQQSNEDPFTFGSGTKLEIK

SEQ ID NO: 32061 - protein, 15 aa, synthetic construct
  source 1..15: note = Description of Artificial Sequence: Synthetic peptide; note = XENP021694 vlCDR1
RASQSVDHDGDSYMN

SEQ ID NO: 32062 - protein, 7 aa, synthetic construct
  source 1..7: note = Description of Artificial Sequence: Synthetic peptide; note = XENP021694 vlCDR2
AASNLES

SEQ ID NO: 32063 - protein, 9 aa, synthetic construct
  source 1..9: note = Description of Artificial Sequence: Synthetic peptide; note = XENP021694 vlCDR3
QQSNEDPFT

SEQ ID NO: 32064 - protein, 226 aa, synthetic construct; identical to SEQ ID NO: 28934
  source 1..226: note = Description of Artificial Sequence: Synthetic polypeptide; note = XENP021695 7G8_H3_L1.10_Fab Heavy Chain

SEQ ID NO: 32065 - protein, 121 aa, synthetic construct; identical to SEQ ID NO: 17806
  source 1..121: note = Description of Artificial Sequence: Synthetic polypeptide; note = VH of XENP021695

SEQ ID NO: 32066 - protein, 5 aa, synthetic construct
  source 1..5: note = Description of Artificial Sequence: Synthetic peptide; note = XENP021695 vhCDR1
DAWMD

SEQ ID NO: 32067 - protein, 19 aa, synthetic construct
  source 1..19: note = Description of Artificial Sequence: Synthetic peptide; note = XENP021695 vhCDR2
EIRTKANNHATYYAESVKG

SEQ ID NO: 32068 - protein, 10 aa, synthetic construct
  source 1..10: note = Description of Artificial Sequence: Synthetic peptide; note = XENP021695 vhCDR3
LANWDWYFDV

SEQ ID NO: 32069 - protein, 218 aa, synthetic construct
  source 1..218: note = Description of Artificial Sequence: Synthetic polypeptide; note = XENP021695 7G8_H3_L1.10_Fab Light Chain
DTVLTQSPSSLSASVGDRVTITCRASQSVDYDDDSYMNWYQQKPGKPPKLLIYAASNLESGIPARLSGSGSGTDFTLTISSLQPEDFATYYCQQSNEDPFTFGSGTKLEIKRTVAAPSVFIFPPSDEQLKSGTASVVCLLNNFYPREAKVQWKVDNALQSGNSQESVTEQDSKDSTYSLSSTLTLSKADYEKHKVYACEVTHQGLSSPVTKSFNRGEC

SEQ ID NO: 32070 - protein, 111 aa, synthetic construct
  source 1..111: note = Description of Artificial Sequence: Synthetic polypeptide; note = VL of XENP021695
DTVLTQSPSSLSASVGDRVTITCRASQSVDYDDDSYMNWYQQKPGKPPKLLIYAASNLESGIPARLSGSGSGTDFTLTISSLQPEDFATYYCQQSNEDPFTFGSGTKLEIK

SEQ ID NO: 32071 - protein, 15 aa, synthetic construct
  source 1..15: note = Description of Artificial Sequence: Synthetic peptide; note = XENP021695 vlCDR1
RASQSVDYDDDSYMN

SEQ ID NO: 32072 - protein, 7 aa, synthetic construct
  source 1..7: note = Description of Artificial Sequence: Synthetic peptide; note = XENP021695 vlCDR2
AASNLES

SEQ ID NO: 32073 - protein, 9 aa, synthetic construct
  source 1..9: note = Description of Artificial Sequence: Synthetic peptide; note = XENP021695 vlCDR3
QQSNEDPFT

SEQ ID NO: 32074 - protein, 226 aa, synthetic construct; identical to SEQ ID NO: 28934
  source 1..226: note = Description of Artificial Sequence: Synthetic polypeptide; note = XENP021696 7G8_H3_L1.11_Fab Heavy Chain

SEQ ID NO: 32075 - protein, 121 aa, synthetic construct; identical to SEQ ID NO: 17806
  source 1..121: note = Description of Artificial Sequence: Synthetic polypeptide; note = VH of XENP021696

SEQ ID NO: 32076 - protein, 5 aa, synthetic construct
  source 1..5: note = Description of Artificial Sequence: Synthetic peptide; note = XENP021696 vhCDR1
DAWMD

SEQ ID NO: 32077 - protein, 19 aa, synthetic construct
  source 1..19: note = Description of Artificial Sequence: Synthetic peptide; note = XENP021696 vhCDR2
EIRTKANNHATYYAESVKG

SEQ ID NO: 32078 - protein, 10 aa, synthetic construct
  source 1..10: note = Description of Artificial Sequence: Synthetic peptide; note = XENP021696 vhCDR3
LANWDWYFDV

SEQ ID NO: 32079 - protein, 218 aa, synthetic construct; identical to SEQ ID NO: 22359
  source 1..218: note = Description of Artificial Sequence: Synthetic polypeptide; note = XENP021696 7G8_H3_L1.11_Fab Light Chain

SEQ ID NO: 32080 - protein, 111 aa, synthetic construct; identical to SEQ ID NO: 22360
  source 1..111: note = Description of Artificial Sequence: Synthetic polypeptide; note = VL of XENP021696

SEQ ID NO: 32081 - protein, 15 aa, synthetic construct
  source 1..15: note = Description of Artificial Sequence: Synthetic peptide; note = XENP021696 vlCDR1
RASQSVDYDGDSYMN

SEQ ID NO: 32082 - protein, 7 aa, synthetic construct
  source 1..7: note = Description of Artificial Sequence: Synthetic peptide; note = XENP021696 vlCDR2
AASELES

SEQ ID NO: 32083 - protein, 9 aa, synthetic construct
  source 1..9: note = Description of Artificial Sequence: Synthetic peptide; note = XENP021696 vlCDR3
QQSNEDPFT

SEQ ID NO: 32084 - protein, 226 aa, synthetic construct; identical to SEQ ID NO: 28934
  source 1..226: note = Description of Artificial Sequence: Synthetic polypeptide; note = XENP021701 7G8_H3_L1.12_Fab Heavy Chain

SEQ ID NO: 32085 - protein, 121 aa, synthetic construct; identical to SEQ ID NO: 17806
  source 1..121: note = Description of Artificial Sequence: Synthetic polypeptide; note = VH of XENP021701

SEQ ID NO: 32086 - protein, 5 aa, synthetic construct
  source 1..5: note = Description of Artificial Sequence: Synthetic peptide; note = XENP021701 vhCDR1
DAWMD

SEQ ID NO: 32087 - protein, 19 aa, synthetic construct
  source 1..19: note = Description of Artificial Sequence: Synthetic peptide; note = XENP021701 vhCDR2
EIRTKANNHATYYAESVKG

SEQ ID NO: 32088 - protein, 10 aa, synthetic construct
  source 1..10: note = Description of Artificial Sequence: Synthetic peptide; note = XENP021701 vhCDR3
LANWDWYFDV

SEQ ID NO: 32089 - protein, 218 aa, synthetic construct
  source 1..218: note = Description of Artificial Sequence: Synthetic polypeptide; note = XENP021701 7G8_H3_L1.12_Fab Light Chain
DTVLTQSPSSLSASVGDRVTITCRASQSVDHDDDSYMNWYQQKPGKPPKLLIYAASNLESGIPARLSGSGSGTDFTLTISSLQPEDFATYYCQQSNEDPFTFGSGTKLEIKRTVAAPSVFIFPPSDEQLKSGTASVVCLLNNFYPREAKVQWKVDNALQSGNSQESVTEQDSKDSTYSLSSTLTLSKADYEKHKVYACEVTHQGLSSPVTKSFNRGEC

SEQ ID NO: 32090 - protein, 111 aa, synthetic construct
  source 1..111: note = Description of Artificial Sequence: Synthetic polypeptide; note = VL of XENP021701
DTVLTQSPSSLSASVGDRVTITCRASQSVDHDDDSYMNWYQQKPGKPPKLLIYAASNLESGIPARLSGSGSGTDFTLTISSLQPEDFATYYCQQSNEDPFTFGSGTKLEIK

SEQ ID NO: 32091 - protein, 15 aa, synthetic construct
  source 1..15: note = Description of Artificial Sequence: Synthetic peptide; note = XENP021701 vlCDR1
RASQSVDHDDDSYMN

SEQ ID NO: 32092 - protein, 7 aa, synthetic construct
  source 1..7: note = Description of Artificial Sequence: Synthetic peptide; note = XENP021701 vlCDR2
AASNLES

SEQ ID NO: 32093 - protein, 9 aa, synthetic construct
  source 1..9: note = Description of Artificial Sequence: Synthetic peptide; note = XENP021701 vlCDR3
QQSNEDPFT

SEQ ID NO: 32094 - protein, 226 aa, synthetic construct; identical to SEQ ID NO: 28934
  source 1..226: note = Description of Artificial Sequence: Synthetic polypeptide; note = XENP021702 7G8_H3_L1.13_Fab Heavy Chain

SEQ ID NO: 32095 - protein, 121 aa, synthetic construct; identical to SEQ ID NO: 17806
  source 1..121: note = Description of Artificial Sequence: Synthetic polypeptide; note = VH of XENP021702

SEQ ID NO: 32096 - protein, 5 aa, synthetic construct
  source 1..5: note = Description of Artificial Sequence: Synthetic peptide; note = XENP021702 vhCDR1
DAWMD

SEQ ID NO: 32097 - protein, 19 aa, synthetic construct
  source 1..19: note = Description of Artificial Sequence: Synthetic peptide; note = XENP021702 vhCDR2
EIRTKANNHATYYAESVKG

SEQ ID NO: 32098 - protein, 10 aa, synthetic construct
  source 1..10: note = Description of Artificial Sequence: Synthetic peptide; note = XENP021702 vhCDR3
LANWDWYFDV

SEQ ID NO: 32099 - protein, 218 aa, synthetic construct; identical to SEQ ID NO: 22419
  source 1..218: note = Description of Artificial Sequence: Synthetic polypeptide; note = XENP021702 7G8_H3_L1.13_Fab Light Chain

SEQ ID NO: 32100 - protein, 111 aa, synthetic construct; identical to SEQ ID NO: 22420
  source 1..111: note = Description of Artificial Sequence: Synthetic polypeptide; note = VL of XENP021702

SEQ ID NO: 32101 - protein, 15 aa, synthetic construct
  source 1..15: note = Description of Artificial Sequence: Synthetic peptide; note = XENP021702 vlCDR1
RASQSVDHDGDSYMN

SEQ ID NO: 32102 - protein, 7 aa, synthetic construct
  source 1..7: note = Description of Artificial Sequence: Synthetic peptide; note = XENP021702 vlCDR2
AASELES

SEQ ID NO: 32103 - protein, 9 aa, synthetic construct
  source 1..9: note = Description of Artificial Sequence: Synthetic peptide; note = XENP021702 vlCDR3
QQSNEDPFT

SEQ ID NO: 32104 - protein, 226 aa, synthetic construct; identical to SEQ ID NO: 28934
  source 1..226: note = Description of Artificial Sequence: Synthetic polypeptide; note = XENP021703 7G8_H3_L1.14_Fab Heavy Chain

SEQ ID NO: 32105 - protein, 121 aa, synthetic construct; identical to SEQ ID NO: 17806
  source 1..121: note = Description of Artificial Sequence: Synthetic polypeptide; note = VH of XENP021703

SEQ ID NO: 32106 - protein, 5 aa, synthetic construct
  source 1..5: note = Description of Artificial Sequence: Synthetic peptide; note = XENP021703 vhCDR1
DAWMD

SEQ ID NO: 32107 - protein, 19 aa, synthetic construct
  source 1..19: note = Description of Artificial Sequence: Synthetic peptide; note = XENP021703 vhCDR2
EIRTKANNHATYYAESVKG

SEQ ID NO: 32108 - protein, 10 aa, synthetic construct
  source 1..10: note = Description of Artificial Sequence: Synthetic peptide; note = XENP021703 vhCDR3
LANWDWYFDV

SEQ ID NO: 32109 - protein, 218 aa, synthetic construct; identical to SEQ ID NO: 29039
  source 1..218: note = Description of Artificial Sequence: Synthetic polypeptide; note = XENP021703 7G8_H3_L1.14_Fab Light Chain

SEQ ID NO: 32110 - protein, 111 aa, synthetic construct; identical to SEQ ID NO: 29040
  source 1..111: note = Description of Artificial Sequence: Synthetic polypeptide; note = VL of XENP021703

SEQ ID NO: 32111 - protein, 15 aa, synthetic construct
  source 1..15: note = Description of Artificial Sequence: Synthetic peptide; note = XENP021703 vlCDR1
RASQSVDYDDDSYMN

SEQ ID NO: 32112 - protein, 7 aa, synthetic construct
  source 1..7: note = Description of Artificial Sequence: Synthetic peptide; note = XENP021703 vlCDR2
AASELES

SEQ ID NO: 32113 - protein, 9 aa, synthetic construct
  source 1..9: note = Description of Artificial Sequence: Synthetic peptide; note = XENP021703 vlCDR3
QQSNEDPFT

SEQ ID NO: 32114 - protein, 226 aa, synthetic construct; identical to SEQ ID NO: 28934
  source 1..226: note = Description of Artificial Sequence: Synthetic polypeptide; note = XENP021704 7G8_H3_L1.15_Fab Heavy Chain

SEQ ID NO: 32115 - protein, 121 aa, synthetic construct; identical to SEQ ID NO: 17806
  source 1..121: note = Description of Artificial Sequence: Synthetic polypeptide; note = VH of XENP021704

SEQ ID NO: 32116 - protein, 5 aa, synthetic construct
  source 1..5: note = Description of Artificial Sequence: Synthetic peptide; note = XENP021704 vhCDR1
DAWMD

SEQ ID NO: 32117 - protein, 19 aa, synthetic construct
  source 1..19: note = Description of Artificial Sequence: Synthetic peptide; note = XENP021704 vhCDR2
EIRTKANNHATYYAESVKG

SEQ ID NO: 32118 - protein, 10 aa, synthetic construct
  source 1..10: note = Description of Artificial Sequence: Synthetic peptide; note = XENP021704 vhCDR3
LANWDWYFDV

SEQ ID NO: 32119 - protein, 218 aa, synthetic construct; identical to SEQ ID NO: 31979
  source 1..218: note = Description of Artificial Sequence: Synthetic polypeptide; note = XENP021704 7G8_H3_L1.15_Fab Light Chain

SEQ ID NO: 32120 - protein, 111 aa, synthetic construct; identical to SEQ ID NO: 31980
  source 1..111: note = Description of Artificial Sequence: Synthetic polypeptide; note = VL of XENP021704

SEQ ID NO: 32121 - protein, 15 aa, synthetic construct
  source 1..15: note = Description of Artificial Sequence: Synthetic peptide; note = XENP021704 vlCDR1
RASQSVDHDDDSYMN

SEQ ID NO: 32122 - protein, 7 aa, synthetic construct
  source 1..7: note = Description of Artificial Sequence: Synthetic peptide; note = XENP021704 vlCDR2
AASELES

SEQ ID NO: 32123 - protein, 9 aa, synthetic construct
  source 1..9: note = Description of Artificial Sequence: Synthetic peptide; note = XENP021704 vlCDR3
QQSNEDPFT

SEQ ID NO: 32124 - protein, 226 aa, synthetic construct
  source 1..226: note = Description of Artificial Sequence: Synthetic polypeptide; note = XENP021742 7G8_H3.11_L1.13_Fab Heavy Chain
EVQLVESGGGLVQPGGSLRLSCAASGFTFSDAWMDWVRQAPGKGLEWVAEISTKANNHATYYAESVKGRFTISRDDSKSSVYLQMNSLRAEDTAVYYCTRLANWDWYFDVWGQGTTVTVSSASTKGPSVFPLAPSSKSTSGGTAALGCLVKDYFPEPVTVSWNSGALTSGVHTFPAVLQSSGLYSLSSVVTVPSSSLGTQTYICNVNHKPSNTKVDKKVEPKSCGS

SEQ ID NO: 32125 - protein, 121 aa, synthetic construct
  source 1..121: note = Description of Artificial Sequence: Synthetic polypeptide; note = VH of XENP021742
EVQLVESGGGLVQPGGSLRLSCAASGFTFSDAWMDWVRQAPGKGLEWVAEISTKANNHATYYAESVKGRFTISRDDSKSSVYLQMNSLRAEDTAVYYCTRLANWDWYFDVWGQGTTVTVSS

SEQ ID NO: 32126 - protein, 5 aa, synthetic construct
  source 1..5: note = Description of Artificial Sequence: Synthetic peptide; note = XENP021742 vhCDR1
DAWMD

SEQ ID NO: 32127 - protein, 19 aa, synthetic construct
  source 1..19: note = Description of Artificial Sequence: Synthetic peptide; note = XENP021742 vhCDR2
EISTKANNHATYYAESVKG

SEQ ID NO: 32128 - protein, 10 aa, synthetic construct
  source 1..10: note = Description of Artificial Sequence: Synthetic peptide; note = XENP021742 vhCDR3
LANWDWYFDV

SEQ ID NO: 32129 - protein, 218 aa, synthetic construct; identical to SEQ ID NO: 22419
  source 1..218: note = Description of Artificial Sequence: Synthetic polypeptide; note = XENP021742 7G8_H3.11_L1.13_Fab Light Chain

SEQ ID NO: 32130 - protein, 111 aa, synthetic construct; identical to SEQ ID NO: 22420
  source 1..111: note = Description of Artificial Sequence: Synthetic polypeptide; note = VL of XENP021742

SEQ ID NO: 32131 - protein, 15 aa, synthetic construct
  source 1..15: note = Description of Artificial Sequence: Synthetic peptide; note = XENP021742 vlCDR1
RASQSVDHDGDSYMN

SEQ ID NO: 32132 - protein, 7 aa, synthetic construct
  source 1..7: note = Description of Artificial Sequence: Synthetic peptide; note = XENP021742 vlCDR2
AASELES

SEQ ID NO: 32133 - protein, 9 aa, synthetic construct
  source 1..9: note = Description of Artificial Sequence: Synthetic peptide; note = XENP021742 vlCDR3
QQSNEDPFT

SEQ ID NO: 32134 - protein, 226 aa, synthetic construct; identical to SEQ ID NO: 28974
  source 1..226: note = Description of Artificial Sequence: Synthetic polypeptide; note = XENP021743 7G8_H3.4_L1.13_Fab Heavy Chain

SEQ ID NO: 32135 - protein, 121 aa, synthetic construct; identical to SEQ ID NO: 28975
  source 1..121: note = Description of Artificial Sequence: Synthetic polypeptide; note = VH of XENP021743

SEQ ID NO: 32136 - protein, 5 aa, synthetic construct
  source 1..5: note = Description of Artificial Sequence: Synthetic peptide; note = XENP021743 vhCDR1
DAWMD

SEQ ID NO: 32137 - protein, 19 aa, synthetic construct
  source 1..19: note = Description of Artificial Sequence: Synthetic peptide; note = XENP021743 vhCDR2
EIRTKANNHATYYAESVKG

SEQ ID NO: 32138 - protein, 10 aa, synthetic construct
  source 1..10: note = Description of Artificial Sequence: Synthetic peptide; note = XENP021743 vhCDR3
LATWDWYFDV

SEQ ID NO: 32139 - protein, 218 aa, synthetic construct; identical to SEQ ID NO: 22419
  source 1..218: note = Description of Artificial Sequence: Synthetic polypeptide; note = XENP021743 7G8_H3.4_L1.13_Fab Light Chain

SEQ ID NO: 32140 - protein, 111 aa, synthetic construct; identical to SEQ ID NO: 22420
  source 1..111: note = Description of Artificial Sequence: Synthetic polypeptide; note = VL of XENP021743

SEQ ID NO: 32141 - protein, 15 aa, synthetic construct
  source 1..15: note = Description of Artificial Sequence: Synthetic peptide; note = XENP021743 vlCDR1
RASQSVDHDGDSYMN

SEQ ID NO: 32142 - protein, 7 aa, synthetic construct
  source 1..7: note = Description of Artificial Sequence: Synthetic peptide; note = XENP021743 vlCDR2
AASELES

SEQ ID NO: 32143 - protein, 9 aa, synthetic construct
  source 1..9: note = Description of Artificial Sequence: Synthetic peptide; note = XENP021743 vlCDR3
QQSNEDPFT

SEQ ID NO: 32144 - protein, 226 aa, synthetic construct; identical to SEQ ID NO: 28944
  source 1..226: note = Description of Artificial Sequence: Synthetic polypeptide; note = XENP021744 7G8_H3.1_L1.13_Fab Heavy Chain

SEQ ID NO: 32145 - protein, 121 aa, synthetic construct; identical to SEQ ID NO: 28945
  source 1..121: note = Description of Artificial Sequence: Synthetic polypeptide; note = VH of XENP021744

SEQ ID NO: 32146 - protein, 5 aa, synthetic construct
  source 1..5: note = Description of Artificial Sequence: Synthetic peptide; note = XENP021744 vhCDR1
DAWMD

SEQ ID NO: 32147 - protein, 19 aa, synthetic construct
  source 1..19: note = Description of Artificial Sequence: Synthetic peptide; note = XENP021744 vhCDR2
EIRTKANNHATYYAESVKG

SEQ ID NO: 32148 - protein, 10 aa, synthetic construct
  source 1..10: note = Description of Artificial Sequence: Synthetic peptide; note = XENP021744 vhCDR3
LATWDWYFDV

SEQ ID NO: 32149 - protein, 218 aa, synthetic construct; identical to SEQ ID NO: 22419
  source 1..218: note = Description of Artificial Sequence: Synthetic polypeptide; note = XENP021744 7G8_H3.1_L1.13_Fab Light Chain

SEQ ID NO: 32150 - protein, 111 aa, synthetic construct; identical to SEQ ID NO: 22420
  source 1..111: note = Description of Artificial Sequence: Synthetic polypeptide; note = VL of XENP021744

SEQ ID NO: 32151 - protein, 15 aa, synthetic construct
  source 1..15: note = Description of Artificial Sequence: Synthetic peptide; note = XENP021744 vlCDR1
RASQSVDHDGDSYMN

SEQ ID NO: 32152 - protein, 7 aa, synthetic construct
  source 1..7: note = Description of Artificial Sequence: Synthetic peptide; note = XENP021744 vlCDR2
AASELES

SEQ ID NO: 32153 - protein, 9 aa, synthetic construct
  source 1..9: note = Description of Artificial Sequence: Synthetic peptide; note = XENP021744 vlCDR3
QQSNEDPFT

SEQ ID NO: 32154 - protein, 226 aa, synthetic construct; identical to SEQ ID NO: 32124
  source 1..226: note = Description of Artificial Sequence: Synthetic polypeptide; note = XENP021745 7G8_H3.11_L1.15_Fab Heavy Chain

SEQ ID NO: 32155 - protein, 121 aa, synthetic construct; identical to SEQ ID NO: 32125
  source 1..121: note = Description of Artificial Sequence: Synthetic polypeptide; note = VH of XENP021745

SEQ ID NO: 32156 - protein, 5 aa, synthetic construct
  source 1..5: note = Description of Artificial Sequence: Synthetic peptide; note = XENP021745 vhCDR1
DAWMD

SEQ ID NO: 32157 - protein, 19 aa, synthetic construct
  source 1..19: note = Description of Artificial Sequence: Synthetic peptide; note = XENP021745 vhCDR2
EISTKANNHATYYAESVKG

SEQ ID NO: 32158 - protein, 10 aa, synthetic construct
  source 1..10: note = Description of Artificial Sequence: Synthetic peptide; note = XENP021745 vhCDR3
LANWDWYFDV

SEQ ID NO: 32159 - protein, 218 aa, synthetic construct; identical to SEQ ID NO: 31979
  source 1..218: note = Description of Artificial Sequence: Synthetic polypeptide; note = XENP021745 7G8_H3.11_L1.15_Fab Light Chain

SEQ ID NO: 32160 - protein, 111 aa, synthetic construct; identical to SEQ ID NO: 31980
  source 1..111: note = Description of Artificial Sequence: Synthetic polypeptide; note = VL of XENP021745

SEQ ID NO: 32161 - protein, 15 aa, synthetic construct
  source 1..15: note = Description of Artificial Sequence: Synthetic peptide; note = XENP021745 vlCDR1
RASQSVDHDDDSYMN

SEQ ID NO: 32162 - protein, 7 aa, synthetic construct
  source 1..7: note = Description of Artificial Sequence: Synthetic peptide; note = XENP021745 vlCDR2
AASELES

SEQ ID NO: 32163 - protein, 9 aa, synthetic construct
  source 1..9: note = Description of Artificial Sequence: Synthetic peptide; note = XENP021745 vlCDR3
QQSNEDPFT

SEQ ID NO: 32164 - protein, 226 aa, synthetic construct; identical to SEQ ID NO: 28974
  source 1..226: note = Description of Artificial Sequence: Synthetic polypeptide; note = XENP021746 7G8_H3.4_L1.15_Fab Heavy Chain

SEQ ID NO: 32165 - protein, 121 aa, synthetic construct; identical to SEQ ID NO: 28975
  source 1..121: note = Description of Artificial Sequence: Synthetic polypeptide; note = VH of XENP021746

SEQ ID NO: 32166 - protein, 5 aa, synthetic construct
  source 1..5: note = Description of Artificial Sequence: Synthetic peptide; note = XENP021746 vhCDR1
DAWMD

SEQ ID NO: 32167 - protein, 19 aa, synthetic construct
  source 1..19: note = Description of Artificial Sequence: Synthetic peptide; note = XENP021746 vhCDR2
EIRTKANNHATYYAESVKG

SEQ ID NO: 32168 - protein, 10 aa, synthetic construct
  source 1..10: note = Description of Artificial Sequence: Synthetic peptide; note = XENP021746 vhCDR3
LATWDWYFDV

SEQ ID NO: 32169 - protein, 218 aa, synthetic construct; identical to SEQ ID NO: 31979
  source 1..218: note = Description of Artificial Sequence: Synthetic polypeptide; note = XENP021746 7G8_H3.4_L1.15_Fab Light Chain

SEQ ID NO: 32170 - protein, 111 aa, synthetic construct; identical to SEQ ID NO: 31980
  source 1..111: note = Description of Artificial Sequence: Synthetic polypeptide; note = VL of XENP021746

SEQ ID NO: 32171 - protein, 15 aa, synthetic construct
  source 1..15: note = Description of Artificial Sequence: Synthetic peptide; note = XENP021746 vlCDR1
RASQSVDHDDDSYMN

SEQ ID NO: 32172 - protein, 7 aa, synthetic construct
  source 1..7: note = Description of Artificial Sequence: Synthetic peptide; note = XENP021746 vlCDR2
AASELES

SEQ ID NO: 32173 - protein, 9 aa, synthetic construct
  source 1..9: note = Description of Artificial Sequence: Synthetic peptide; note = XENP021746 vlCDR3
QQSNEDPFT

SEQ ID NO: 32174 - protein, 226 aa, synthetic construct; identical to SEQ ID NO: 28944
  source 1..226: note = Description of Artificial Sequence: Synthetic polypeptide; note = XENP021747 7G8_H3.1_L1.15_Fab Heavy Chain

SEQ ID NO: 32175 - protein, 121 aa, synthetic construct; identical to SEQ ID NO: 28945
  source 1..121: note = Description of Artificial Sequence: Synthetic polypeptide; note = VH of XENP021747

SEQ ID NO: 32176 - protein, 5 aa, synthetic construct
  source 1..5: note = Description of Artificial Sequence: Synthetic peptide; note = XENP021747 vhCDR1
DAWMD

SEQ ID NO: 32177 - protein, 19 aa, synthetic construct
  source 1..19: note = Description of Artificial Sequence: Synthetic peptide; note = XENP021747 vhCDR2
EIRTKANNHATYYAESVKG

SEQ ID NO: 32178 - protein, 10 aa, synthetic construct
  source 1..10: note = Description of Artificial Sequence: Synthetic peptide; note = XENP021747 vhCDR3
LATWDWYFDV

SEQ ID NO: 32179 - protein, 218 aa, synthetic construct; identical to SEQ ID NO: 31979
  source 1..218: note = Description of Artificial Sequence: Synthetic polypeptide; note = XENP021747 7G8_H3.1_L1.15_Fab Light Chain

SEQ ID NO: 32180 - protein, 111 aa, synthetic construct; identical to SEQ ID NO: 31980
  source 1..111: note = Description of Artificial Sequence: Synthetic polypeptide; note = VL of XENP021747

SEQ ID NO: 32181 - protein, 15 aa, synthetic construct
  source 1..15: note = Description of Artificial Sequence: Synthetic peptide; note = XENP021747 vlCDR1
RASQSVDHDDDSYMN

SEQ ID NO: 32182 - protein, 7 aa, synthetic construct
  source 1..7: note = Description of Artificial Sequence: Synthetic peptide; note = XENP021747 vlCDR2
AASELES

SEQ ID NO: 32183 - protein, 9 aa, synthetic construct
  source 1..9: note = Description of Artificial Sequence: Synthetic peptide; note = XENP021747 vlCDR3
QQSNEDPFT

SEQ ID NO: 32184 - protein, 226 aa, synthetic construct
  source 1..226: note = Description of Artificial Sequence: Synthetic polypeptide; note = XENP021889 7G8_H3.27_L1_Fab Heavy Chain
EVQLVESGGGLVQPGGSLRLSCAASGDTFDDAWMDWVRQAPGKGLEWVAEISTKAYNHATYYAESVKGRFTISRDDSKSSVYLQMNSLRAEDTAVYYCTRLATWDWYFDVWGQGTTVTVSSASTKGPSVFPLAPSSKSTSGGTAALGCLVKDYFPEPVTVSWNSGALTSGVHTFPAVLQSSGLYSLSSVVTVPSSSLGTQTYICNVNHKPSDTKVDKKVEPKSCGS

SEQ ID NO: 32185 - protein, 121 aa, synthetic construct
  source 1..121: note = Description of Artificial Sequence: Synthetic polypeptide; note = VH of XENP021889
EVQLVESGGGLVQPGGSLRLSCAASGDTFDDAWMDWVRQAPGKGLEWVAEISTKAYNHATYYAESVKGRFTISRDDSKSSVYLQMNSLRAEDTAVYYCTRLATWDWYFDVWGQGTTVTVSS

SEQ ID NO: 32186 - protein, 5 aa, synthetic construct
  source 1..5: note = Description of Artificial Sequence: Synthetic peptide; note = XENP021889 vhCDR1
DAWMD

SEQ ID NO: 32187 - protein, 19 aa, synthetic construct
  source 1..19: note = Description of Artificial Sequence: Synthetic peptide; note = XENP021889 vhCDR2
EISTKAYNHATYYAESVKG

SEQ ID NO: 32188 - protein, 10 aa, synthetic construct
  source 1..10: note = Description of Artificial Sequence: Synthetic peptide; note = XENP021889 vhCDR3
LATWDWYFDV

SEQ ID NO: 32189 - protein, 218 aa, synthetic construct; identical to SEQ ID NO: 17600
  source 1..218: note = Description of Artificial Sequence: Synthetic polypeptide; note = XENP021889 7G8_H3.27_L1_Fab Light Chain

SEQ ID NO: 32190 - protein, 111 aa, synthetic construct; identical to SEQ ID NO: 17601
  source 1..111: note = Description of Artificial Sequence: Synthetic polypeptide; note = VL of XENP021889

SEQ ID NO: 32191 - protein, 15 aa, synthetic construct
  source 1..15: note = Description of Artificial Sequence: Synthetic peptide; note = XENP021889 vlCDR1
RASQSVDYDGDSYMN

SEQ ID NO: 32192 - protein, 7 aa, synthetic construct
  source 1..7: note = Description of Artificial Sequence: Synthetic peptide; note = XENP021889 vlCDR2
AASNLES

SEQ ID NO: 32193 - protein, 9 aa, synthetic construct
  source 1..9: note = Description of Artificial Sequence: Synthetic peptide; note = XENP021889 vlCDR3
QQSNEDPFT

SEQ ID NO: 32194 - protein, 226 aa, synthetic construct; identical to SEQ ID NO: 32184
  source 1..226: note = Description of Artificial Sequence: Synthetic polypeptide; note = XENP021890 7G8_H3.27_L1.11_Fab Heavy Chain

SEQ ID NO: 32195 - protein, 121 aa, synthetic construct; identical to SEQ ID NO: 32185
  source 1..121: note = Description of Artificial Sequence: Synthetic polypeptide; note = VH of XENP021890

SEQ ID NO: 32196 - protein, 5 aa, synthetic construct
  source 1..5: note = Description of Artificial Sequence: Synthetic peptide; note = XENP021890 vhCDR1
DAWMD

SEQ ID NO: 32197 - protein, 19 aa, synthetic construct
  source 1..19: note = Description of Artificial Sequence: Synthetic peptide; note = XENP021890 vhCDR2
EISTKAYNHATYYAESVKG

SEQ ID NO: 32198 - protein, 10 aa, synthetic construct
  source 1..10: note = Description of Artificial Sequence: Synthetic peptide; note = XENP021890 vhCDR3
LATWDWYFDV

SEQ ID NO: 32199 - protein, 218 aa, synthetic construct; identical to SEQ ID NO: 22359
  source 1..218: note = Description of Artificial Sequence: Synthetic polypeptide; note = XENP021890 7G8_H3.27_L1.11_Fab Light Chain

SEQ ID NO: 32200 - protein, 111 aa, synthetic construct; identical to SEQ ID NO: 22360
  source 1..111: note = Description of Artificial Sequence: Synthetic polypeptide; note = VL of XENP021890

SEQ ID NO: 32201 - protein, 15 aa, synthetic construct
  source 1..15: note = Description of Artificial Sequence: Synthetic peptide; note = XENP021890 vlCDR1
RASQSVDYDGDSYMN

SEQ ID NO: 32202 - protein, 7 aa, synthetic construct
  source 1..7: note = Description of Artificial Sequence: Synthetic peptide; note = XENP021890 vlCDR2
AASELES

SEQ ID NO: 32203 - protein, 9 aa, synthetic construct
  source 1..9: note = Description of Artificial Sequence: Synthetic peptide; note = XENP021890 vlCDR3
QQSNEDPFT

SEQ ID NO: 32204 - protein, 226 aa, synthetic construct; identical to SEQ ID NO: 32184
  source 1..226: note = Description of Artificial Sequence: Synthetic polypeptide; note = XENP021891 7G8_H3.27_L1.13_Fab Heavy Chain

SEQ ID NO: 32205 - protein, 121 aa, synthetic construct; identical to SEQ ID NO: 32185
  source 1..121: note = Description of Artificial Sequence: Synthetic polypeptide; note = VH of XENP021891

SEQ ID NO: 32206 - protein, 5 aa, synthetic construct
  source 1..5: note = Description of Artificial Sequence: Synthetic peptide; note = XENP021891 vhCDR1
DAWMD

SEQ ID NO: 32207 - protein, 19 aa, synthetic construct
  source 1..19: note = Description of Artificial Sequence: Synthetic peptide; note = XENP021891 vhCDR2
EISTKAYNHATYYAESVKG

SEQ ID NO: 32208 - protein, 10 aa, synthetic construct
  source 1..10: note = Description of Artificial Sequence: Synthetic peptide; note = XENP021891 vhCDR3
LATWDWYFDV

SEQ ID NO: 32209 - protein, 218 aa, synthetic construct; identical to SEQ ID NO: 22419
  source 1..218: note = Description of Artificial Sequence: Synthetic polypeptide; note = XENP021891 7G8_H3.27_L1.13_Fab Light Chain

SEQ ID NO: 32210 - protein, 111 aa, synthetic construct; identical to SEQ ID NO: 22420
  source 1..111: note = Description of Artificial Sequence: Synthetic polypeptide; note = VL of XENP021891

SEQ ID NO: 32211 - protein, 15 aa, synthetic construct
  source 1..15: note = Description of Artificial Sequence: Synthetic peptide; note = XENP021891 vlCDR1
RASQSVDHDGDSYMN

SEQ ID NO: 32212 - protein, 7 aa, synthetic construct
  source 1..7: note = Description of Artificial Sequence: Synthetic peptide; note = XENP021891 vlCDR2
AASELES

SEQ ID NO: 32213 - protein, 9 aa, synthetic construct
  source 1..9: note = Description of Artificial Sequence: Synthetic peptide; note = XENP021891 vlCDR3
QQSNEDPFT

SEQ ID NO: 32214 - protein, 226 aa, synthetic construct
  source 1..226: note = Description of Artificial Sequence: Synthetic polypeptide; note = XENP021892 7G8_H3.28_L1_Fab Heavy Chain
EVQLVESGGGLVQPGGSLRLSCAASGFTFDDAWMDWVRQAPGKGLEWVAEISTKAYNHATYYAESVKGRFTISRDDSKSSVYLQMNSLRAEDTAVYYCTRLATWDWYFDVWGQGTTVTVSSASTKGPSVFPLAPSSKSTSGGTAALGCLVKDYFPEPVTVSWNSGALTSGVHTFPAVLQSSGLYSLSSVVTVPSSSLGTQTYICNVNHKPSDTKVDKKVEPKSCGS

SEQ ID NO: 32215 - protein, 121 aa, synthetic construct; identical to SEQ ID NO: 22425
  source 1..121: note = Description of Artificial Sequence: Synthetic polypeptide; note = VH of XENP021892

SEQ ID NO: 32216 - protein, 5 aa, synthetic construct
  source 1..5: note = Description of Artificial Sequence: Synthetic peptide; note = XENP021892 vhCDR1
DAWMD

SEQ ID NO: 32217 - protein, 19 aa, synthetic construct
  source 1..19: note = Description of Artificial Sequence: Synthetic peptide; note = XENP021892 vhCDR2
EISTKAYNHATYYAESVKG

SEQ ID NO: 32218 - protein, 10 aa, synthetic construct
  source 1..10: note = Description of Artificial Sequence: Synthetic peptide; note = XENP021892 vhCDR3
LATWDWYFDV

SEQ ID NO: 32219 - protein, 218 aa, synthetic construct; identical to SEQ ID NO: 17600
  source 1..218: note = Description of Artificial Sequence: Synthetic polypeptide; note = XENP021892 7G8_H3.28_L1_Fab Light Chain

SEQ ID NO: 32220 - protein, 111 aa, synthetic construct; identical to SEQ ID NO: 17601
  source 1..111: note = Description of Artificial Sequence: Synthetic polypeptide; note = VL of XENP021892

SEQ ID NO: 32221 - protein, 15 aa, synthetic construct
  source 1..15: note = Description of Artificial Sequence: Synthetic peptide; note = XENP021892 vlCDR1
RASQSVDYDGDSYMN

SEQ ID NO: 32222 - protein, 7 aa, synthetic construct
  source 1..7: note = Description of Artificial Sequence: Synthetic peptide; note = XENP021892 vlCDR2
AASNLES

SEQ ID NO: 32223 - protein, 9 aa, synthetic construct
  source 1..9: note = Description of Artificial Sequence: Synthetic peptide; note = XENP021892 vlCDR3
QQSNEDPFT

SEQ ID NO: 32224 - protein, 226 aa, synthetic construct; identical to SEQ ID NO: 32214
  source 1..226: note = Description of Artificial Sequence: Synthetic polypeptide; note = XENP021893 7G8_H3.28_L1.11_Fab Heavy Chain

SEQ ID NO: 32225 - protein, 121 aa, synthetic construct; identical to SEQ ID NO: 22425
  source 1..121: note = Description of Artificial Sequence: Synthetic polypeptide; note = VH of XENP021893

SEQ ID NO: 32226 - protein, 5 aa, synthetic construct
  source 1..5: note = Description of Artificial Sequence: Synthetic peptide; note = XENP021893 vhCDR1
DAWMD

SEQ ID NO: 32227 - protein, 19 aa, synthetic construct
  source 1..19: note = Description of Artificial Sequence: Synthetic peptide; note = XENP021893 vhCDR2
EISTKAYNHATYYAESVKG

SEQ ID NO: 32228 - protein, 10 aa, synthetic construct
  source 1..10: note = Description of Artificial Sequence: Synthetic peptide; note = XENP021893 vhCDR3
LATWDWYFDV

SEQ ID NO: 32229 - protein, 218 aa, synthetic construct; identical to SEQ ID NO: 22359
  source 1..218: note = Description of Artificial Sequence: Synthetic polypeptide; note = XENP021893 7G8_H3.28_L1.11_Fab Light Chain

SEQ ID NO: 32230 - protein, 111 aa, synthetic construct; identical to SEQ ID NO: 22360
  source 1..111: note = Description of Artificial Sequence: Synthetic polypeptide; note = VL of XENP021893

SEQ ID NO: 32231 - protein, 15 aa, synthetic construct
  source 1..15: note = Description of Artificial Sequence: Synthetic peptide; note = XENP021893 vlCDR1
RASQSVDYDGDSYMN

SEQ ID NO: 32232 - protein, 7 aa, synthetic construct
  source 1..7: note = Description of Artificial Sequence: Synthetic peptide; note = XENP021893 vlCDR2
AASELES

SEQ ID NO: 32233 - protein, 9 aa, synthetic construct
  source 1..9: note = Description of Artificial Sequence: Synthetic peptide; note = XENP021893 vlCDR3
QQSNEDPFT

SEQ ID NO: 32234 - protein, 226 aa, synthetic construct; identical to SEQ ID NO: 32214
  source 1..226: note = Description of Artificial Sequence: Synthetic polypeptide; note = XENP021894 7G8_H3.28_L1.13_Fab Heavy Chain

SEQ ID NO: 32235 - protein, 121 aa, synthetic construct; identical to SEQ ID NO: 22425
  source 1..121: note = Description of Artificial Sequence: Synthetic polypeptide; note = VH of XENP021894

SEQ ID NO: 32236 - protein, 5 aa, synthetic construct
  source 1..5: note = Description of Artificial Sequence: Synthetic peptide; note = XENP021894 vhCDR1
DAWMD

SEQ ID NO: 32237 - protein, 19 aa, synthetic construct
  source 1..19: note = Description of Artificial Sequence: Synthetic peptide; note = XENP021894 vhCDR2
EISTKAYNHATYYAESVKG

SEQ ID NO: 32238 - protein, 10 aa, synthetic construct
  source 1..10: note = Description of Artificial Sequence: Synthetic peptide; note = XENP021894 vhCDR3
LATWDWYFDV

SEQ ID NO: 32239 - protein, 218 aa, synthetic construct; identical to SEQ ID NO: 22419
  source 1..218: note = Description of Artificial Sequence: Synthetic polypeptide; note = XENP021894 7G8_H3.28_L1.13_Fab Light Chain

SEQ ID NO: 32240 - protein, 111 aa, synthetic construct; identical to SEQ ID NO: 22420
  source 1..111: note = Description of Artificial Sequence: Synthetic polypeptide; note = VL of XENP021894

SEQ ID NO: 32241 - protein, 15 aa, synthetic construct
  source 1..15: note = Description of Artificial Sequence: Synthetic peptide; note = XENP021894 vlCDR1
RASQSVDHDGDSYMN

SEQ ID NO: 32242 - protein, 7 aa, synthetic construct
  source 1..7: note = Description of Artificial Sequence: Synthetic peptide; note = XENP021894 vlCDR2
AASELES

SEQ ID NO: 32243 - protein, 9 aa, synthetic construct
  source 1..9: note = Description of Artificial Sequence: Synthetic peptide; note = XENP021894 vlCDR3
QQSNEDPFT

SEQ ID NO: 32244 - protein, 226 aa, synthetic construct
  source 1..226: note = Description of Artificial Sequence: Synthetic polypeptide; note = XENP022379 7G8_H3.29_L1.11_Fab Heavy Chain
EVQLVESGGGLVQPGGSLRLSCAASGFTFDDAWMHWVRQAPGKGLEWVAEISTKANNHATYYAESVKGRFTISRDDSKSSVYLQMNSLRAEDTAVYYCTRLATWDWYFDVWGQGTTVTVSSASTKGPSVFPLAPSSKSTSGGTAALGCLVKDYFPEPVTVSWNSGALTSGVHTFPAVLQSSGLYSLSSVVTVPSSSLGTQTYICNVNHKPSNTKVDKKVEPKSCGS

SEQ ID NO: 32245 - protein, 121 aa, synthetic construct
  source 1..121: note = Description of Artificial Sequence: Synthetic polypeptide; note = VH of XENP022379
EVQLVESGGGLVQPGGSLRLSCAASGFTFDDAWMHWVRQAPGKGLEWVAEISTKANNHATYYAESVKGRFTISRDDSKSSVYLQMNSLRAEDTAVYYCTRLATWDWYFDVWGQGTTVTVSS

SEQ ID NO: 32246 - protein, 5 aa, synthetic construct
  source 1..5: note = Description of Artificial Sequence: Synthetic peptide; note = XENP022379 vhCDR1
DAWMH

SEQ ID NO: 32247 - protein, 19 aa, synthetic construct
  source 1..19: note = Description of Artificial Sequence: Synthetic peptide; note = XENP022379 vhCDR2
EISTKANNHATYYAESVKG

SEQ ID NO: 32248 - protein, 10 aa, synthetic construct
  source 1..10: note = Description of Artificial Sequence: Synthetic peptide; note = XENP022379 vhCDR3
LATWDWYFDV

SEQ ID NO: 32249 - protein, 218 aa, synthetic construct; identical to SEQ ID NO: 22359
  source 1..218: note = Description of Artificial Sequence: Synthetic polypeptide; note = XENP022379 7G8_H3.29_L1.11_Fab Light Chain

SEQ ID NO: 32250 - protein, 111 aa, synthetic construct; identical to SEQ ID NO: 22360
  source 1..111: note = Description of Artificial Sequence: Synthetic polypeptide; note = VL of XENP022379

SEQ ID NO: 32251 - protein, 15 aa, synthetic construct
  source 1..15: note = Description of Artificial Sequence: Synthetic peptide; note = XENP022379 vlCDR1
RASQSVDYDGDSYMN

SEQ ID NO: 32252 - protein, 7 aa, synthetic construct
  source 1..7: note = Description of Artificial Sequence: Synthetic peptide; note = XENP022379 vlCDR2
AASELES

SEQ ID NO: 32253 - protein, 9 aa, synthetic construct
  source 1..9: note = Description of Artificial Sequence: Synthetic peptide; note = XENP022379 vlCDR3
QQSNEDPFT

SEQ ID NO: 32254 - protein, 226 aa, synthetic construct
  source 1..226: note = Description of Artificial Sequence: Synthetic polypeptide; note = XENP022380 7G8_H3.30_L1.11_Fab Heavy Chain
EVQLVESGGGLVQPGGSLRLSCAASGFTFDDAWMSWVRQAPGKGLEWVAEISTKANNHATYYAESVKGRFTISRDDSKSSVYLQMNSLRAEDTAVYYCTRLATWDWYFDVWGQGTTVTVSSASTKGPSVFPLAPSSKSTSGGTAALGCLVKDYFPEPVTVSWNSGALTSGVHTFPAVLQSSGLYSLSSVVTVPSSSLGTQTYICNVNHKPSNTKVDKKVEPKSCGS

SEQ ID NO: 32255 - protein, 121 aa, synthetic construct; identical to SEQ ID NO: 22485
  source 1..121: note = Description of Artificial Sequence: Synthetic polypeptide; note = VH of XENP022380

SEQ ID NO: 32256 - protein, 5 aa, synthetic construct
  source 1..5: note = Description of Artificial Sequence: Synthetic peptide; note = XENP022380 vhCDR1
DAWMS

SEQ ID NO: 32257 - protein, 19 aa, synthetic construct
  source 1..19: note = Description of Artificial Sequence: Synthetic peptide; note = XENP022380 vhCDR2
EISTKANNHATYYAESVKG

SEQ ID NO: 32258 - protein, 10 aa, synthetic construct
  source 1..10: note = Description of Artificial Sequence: Synthetic peptide; note = XENP022380 vhCDR3
LATWDWYFDV

SEQ ID NO: 32259 - protein, 218 aa, synthetic construct; identical to SEQ ID NO: 22359
  source 1..218: note = Description of Artificial Sequence: Synthetic polypeptide; note = XENP022380 7G8_H3.30_L1.11_Fab Light Chain

SEQ ID NO: 32260 - protein, 111 aa, synthetic construct; identical to SEQ ID NO: 22360
  source 1..111: note = Description of Artificial Sequence: Synthetic polypeptide; note = VL of XENP022380

SEQ ID NO: 32261 - protein, 15 aa, synthetic construct
  source 1..15: note = Description of Artificial Sequence: Synthetic peptide; note = XENP022380 vlCDR1
RASQSVDYDGDSYMN

SEQ ID NO: 32262 - protein, 7 aa, synthetic construct
  source 1..7: note = Description of Artificial Sequence: Synthetic peptide; note = XENP022380 vlCDR2
AASELES

SEQ ID NO: 32263 - protein, 9 aa, synthetic construct
  source 1..9: note = Description of Artificial Sequence: Synthetic peptide; note = XENP022380 vlCDR3
QQSNEDPFT

SEQ ID NO: 32264 - protein, 226 aa, synthetic construct
  source 1..226: note = Description of Artificial Sequence: Synthetic polypeptide; note = XENP022381 7G8_H3.31_L1.11_Fab Heavy Chain
EVQLVESGGGLVQPGGSLRLSCAASGFTFDDAWMNWVRQAPGKGLEWVAEISTKANNHATYYAESVKGRFTISRDDSKSSVYLQMNSLRAEDTAVYYCTRLATWDWYFDVWGQGTTVTVSSASTKGPSVFPLAPSSKSTSGGTAALGCLVKDYFPEPVTVSWNSGALTSGVHTFPAVLQSSGLYSLSSVVTVPSSSLGTQTYICNVNHKPSNTKVDKKVEPKSCGS

SEQ ID NO: 32265 - protein, 121 aa, synthetic construct
  source 1..121: note = Description of Artificial Sequence: Synthetic polypeptide; note = VH of XENP022381
EVQLVESGGGLVQPGGSLRLSCAASGFTFDDAWMNWVRQAPGKGLEWVAEISTKANNHATYYAESVKGRFTISRDDSKSSVYLQMNSLRAEDTAVYYCTRLATWDWYFDVWGQGTTVTVSS

SEQ ID NO: 32266 - protein, 5 aa, synthetic construct
  source 1..5: note = Description of Artificial Sequence: Synthetic peptide; note = XENP022381 vhCDR1
DAWMN

SEQ ID NO: 32267 - protein, 19 aa, synthetic construct
  source 1..19: note = Description of Artificial Sequence: Synthetic peptide; note = XENP022381 vhCDR2
EISTKANNHATYYAESVKG

SEQ ID NO: 32268 - protein, 10 aa, synthetic construct
  source 1..10: note = Description of Artificial Sequence: Synthetic peptide; note = XENP022381 vhCDR3
LATWDWYFDV

SEQ ID NO: 32269 - protein, 218 aa, synthetic construct; identical to SEQ ID NO: 22359
  source 1..218: note = Description of Artificial Sequence: Synthetic polypeptide; note = XENP022381 7G8_H3.31_L1.11_Fab Light Chain

SEQ ID NO: 32270 - protein, 111 aa, synthetic construct; identical to SEQ ID NO: 22360
  source 1..111: note = Description of Artificial Sequence: Synthetic polypeptide; note = VL of XENP022381

SEQ ID NO: 32271 - protein, 15 aa, synthetic construct
  source 1..15: note = Description of Artificial Sequence: Synthetic peptide; note = XENP022381 vlCDR1
RASQSVDYDGDSYMN

SEQ ID NO: 32272 - protein, 7 aa, synthetic construct
  source 1..7: note = Description of Artificial Sequence: Synthetic peptide; note = XENP022381 vlCDR2
AASELES

SEQ ID NO: 32273 - protein, 9 aa, synthetic construct
  source 1..9: note = Description of Artificial Sequence: Synthetic peptide; note = XENP022381 vlCDR3
QQSNEDPFT

SEQ ID NO: 32274 - protein, 226 aa, synthetic construct
  source 1..226: note = Description of Artificial Sequence: Synthetic polypeptide; note = XENP022382 7G8_H3.32_L1.11_Fab Heavy Chain
EVQLVESGGGLVQPGGSLRLSCAASGFTFDDAWMQWVRQAPGKGLEWVAEISTKANNHATYYAESVKGRFTISRDDSKSSVYLQMNSLRAEDTAVYYCTRLATWDWYFDVWGQGTTVTVSSASTKGPSVFPLAPSSKSTSGGTAALGCLVKDYFPEPVTVSWNSGALTSGVHTFPAVLQSSGLYSLSSVVTVPSSSLGTQTYICNVNHKPSNTKVDKKVEPKSCGS

SEQ ID NO: 32275 - protein, 121 aa, synthetic construct
  source 1..121: note = Description of Artificial Sequence: Synthetic polypeptide; note = VH of XENP022382
EVQLVESGGGLVQPGGSLRLSCAASGFTFDDAWMQWVRQAPGKGLEWVAEISTKANNHATYYAESVKGRFTISRDDSKSSVYLQMNSLRAEDTAVYYCTRLATWDWYFDVWGQGTTVTVSS

SEQ ID NO: 32276 - protein, 5 aa, synthetic construct
  source 1..5: note = Description of Artificial Sequence: Synthetic peptide; note = XENP022382 vhCDR1
DAWMQ

SEQ ID NO: 32277 - protein, 19 aa, synthetic construct
  source 1..19: note = Description of Artificial Sequence: Synthetic peptide; note = XENP022382 vhCDR2
EISTKANNHATYYAESVKG

SEQ ID NO: 32278 - protein, 10 aa, synthetic construct
  source 1..10: note = Description of Artificial Sequence: Synthetic peptide; note = XENP022382 vhCDR3
LATWDWYFDV

SEQ ID NO: 32279 - protein, 218 aa, synthetic construct; identical to SEQ ID NO: 22359
  source 1..218: note = Description of Artificial Sequence: Synthetic polypeptide; note = XENP022382 7G8_H3.32_L1.11_Fab Light Chain

SEQ ID NO: 32280 - protein, 111 aa, synthetic construct; identical to SEQ ID NO: 22360
  source 1..111: note = Description of Artificial Sequence: Synthetic polypeptide; note = VL of XENP022382

SEQ ID NO: 32281 - protein, 15 aa, synthetic construct
  source 1..15: note = Description of Artificial Sequence: Synthetic peptide; note = XENP022382 vlCDR1
RASQSVDYDGDSYMN

SEQ ID NO: 32282 - protein, 7 aa, synthetic construct
  source 1..7: note = Description of Artificial Sequence: Synthetic peptide; note = XENP022382 vlCDR2
AASELES

SEQ ID NO: 32283 - protein, 9 aa, synthetic construct
  source 1..9: note = Description of Artificial Sequence: Synthetic peptide; note = XENP022382 vlCDR3
QQSNEDPFT

SEQ ID NO: 32284 - protein, 226 aa, synthetic construct
  source 1..226: note = Description of Artificial Sequence: Synthetic polypeptide; note = XENP022383 7G8_H3.33_L1.11_Fab Heavy Chain
EVQLVESGGGLVQPGGSLRLSCAASGFTFDDAWMGWVRQAPGKGLEWVAEISTKANNHATYYAESVKGRFTISRDDSKSSVYLQMNSLRAEDTAVYYCTRLATWDWYFDVWGQGTTVTVSSASTKGPSVFPLAPSSKSTSGGTAALGCLVKDYFPEPVTVSWNSGALTSGVHTFPAVLQSSGLYSLSSVVTVPSSSLGTQTYICNVNHKPSNTKVDKKVEPKSCGS

SEQ ID NO: 32285 - protein, 121 aa, synthetic construct; identical to SEQ ID NO: 22505
  source 1..121: note = Description of Artificial Sequence: Synthetic polypeptide; note = VH of XENP022383

SEQ ID NO: 32286 - protein, 5 aa, synthetic construct
  source 1..5: note = Description of Artificial Sequence: Synthetic peptide; note = XENP022383 vhCDR1
DAWMG

SEQ ID NO: 32287 - protein, 19 aa, synthetic construct
  source 1..19: note = Description of Artificial Sequence: Synthetic peptide; note = XENP022383 vhCDR2
EISTKANNHATYYAESVKG

SEQ ID NO: 32288 - protein, 10 aa, synthetic construct
  source 1..10: note = Description of Artificial Sequence: Synthetic peptide; note = XENP022383 vhCDR3
LATWDWYFDV

SEQ ID NO: 32289 - protein, 218 aa, synthetic construct; identical to SEQ ID NO: 22359
  source 1..218: note = Description of Artificial Sequence: Synthetic polypeptide; note = XENP022383 7G8_H3.33_L1.11_Fab Light Chain

SEQ ID NO: 32290 - protein, 111 aa, synthetic construct; identical to SEQ ID NO: 22360
  source 1..111: note = Description of Artificial Sequence: Synthetic polypeptide; note = VL of XENP022383

SEQ ID NO: 32291 - protein, 15 aa, synthetic construct
  source 1..15: note = Description of Artificial Sequence: Synthetic peptide; note = XENP022383 vlCDR1
RASQSVDYDGDSYMN

SEQ ID NO: 32292 - protein, 7 aa, synthetic construct
  source 1..7: note = Description of Artificial Sequence: Synthetic peptide; note = XENP022383 vlCDR2
AASELES

SEQ ID NO: 32293 - protein, 9 aa, synthetic construct
  source 1..9: note = Description of Artificial Sequence: Synthetic peptide; note = XENP022383 vlCDR3
QQSNEDPFT

SEQ ID NO: 32294 - protein, 226 aa, synthetic construct
  source 1..226: note = Description of Artificial Sequence: Synthetic polypeptide; note = XENP022384 7G8_H3.34_L1.11_Fab Heavy Chain
EVQLVESGGGLVQPGGSLRLSCAASGFTFDDAWMDWVRQAPGKGLEWVAEISTKANNHATYYAQSVKGRFTISRDDSKSSVYLQMNSLRAEDTAVYYCTRLATWDWYFDVWGQGTTVTVSSASTKGPSVFPLAPSSKSTSGGTAALGCLVKDYFPEPVTVSWNSGALTSGVHTFPAVLQSSGLYSLSSVVTVPSSSLGTQTYICNVNHKPSNTKVDKKVEPKSCGS

SEQ ID NO: 32295 - protein, 121 aa, synthetic construct
  source 1..121: note = Description of Artificial Sequence: Synthetic polypeptide; note = VH of XENP022384
EVQLVESGGGLVQPGGSLRLSCAASGFTFDDAWMDWVRQAPGKGLEWVAEISTKANNHATYYAQSVKGRFTISRDDSKSSVYLQMNSLRAEDTAVYYCTRLATWDWYFDVWGQGTTVTVSS

SEQ ID NO: 32296 - protein, 5 aa, synthetic construct
  source 1..5: note = Description of Artificial Sequence: Synthetic peptide; note = XENP022384 vhCDR1
DAWMD

SEQ ID NO: 32297 - protein, 19 aa, synthetic construct
  source 1..19: note = Description of Artificial Sequence: Synthetic peptide; note = XENP022384 vhCDR2
EISTKANNHATYYAQSVKG

SEQ ID NO: 32298 - protein, 10 aa, synthetic construct
  source 1..10: note = Description of Artificial Sequence: Synthetic peptide; note = XENP022384 vhCDR3
LATWDWYFDV

SEQ ID NO: 32299 - protein, 218 aa, synthetic construct; identical to SEQ ID NO: 22359
  source 1..218: note = Description of Artificial Sequence: Synthetic polypeptide; note = XENP022384 7G8_H3.34_L1.11_Fab Light Chain

SEQ ID NO: 32300 - protein, 111 aa, synthetic construct; identical to SEQ ID NO: 22360
  source 1..111: note = Description of Artificial Sequence: Synthetic polypeptide; note = VL of XENP022384

SEQ ID NO: 32301 - protein, 15 aa, synthetic construct
  source 1..15: note = Description of Artificial Sequence: Synthetic peptide; note = XENP022384 vlCDR1
RASQSVDYDGDSYMN

SEQ ID NO: 32302 - protein, 7 aa, synthetic construct
  source 1..7: note = Description of Artificial Sequence: Synthetic peptide; note = XENP022384 vlCDR2
AASELES

SEQ ID NO: 32303 - protein, 9 aa, synthetic construct
  source 1..9: note = Description of Artificial Sequence: Synthetic peptide; note = XENP022384 vlCDR3
QQSNEDPFT

SEQ ID NO: 32304 - protein, 226 aa, synthetic construct
  source 1..226: note = Description of Artificial Sequence: Synthetic polypeptide; note = XENP022385 7G8_H3.35_L1.11_Fab Heavy Chain
EVQLVESGGGLVQPGGSLRLSCAASGFTFDDAWMDWVRQAPGKGLEWVAEISTKANNHATYYAPSVKGRFTISRDDSKSSVYLQMNSLRAEDTAVYYCTRLATWDWYFDVWGQGTTVTVSSASTKGPSVFPLAPSSKSTSGGTAALGCLVKDYFPEPVTVSWNSGALTSGVHTFPAVLQSSGLYSLSSVVTVPSSSLGTQTYICNVNHKPSNTKVDKKVEPKSCGS

SEQ ID NO: 32305 - protein, 121 aa, synthetic construct
  source 1..121: note = Description of Artificial Sequence: Synthetic polypeptide; note = VH of XENP022385
EVQLVESGGGLVQPGGSLRLSCAASGFTFDDAWMDWVRQAPGKGLEWVAEISTKANNHATYYAPSVKGRFTISRDDSKSSVYLQMNSLRAEDTAVYYCTRLATWDWYFDVWGQGTTVTVSS

SEQ ID NO: 32306 - protein, 5 aa, synthetic construct
  source 1..5: note = Description of Artificial Sequence: Synthetic peptide; note = XENP022385 vhCDR1
DAWMD

SEQ ID NO: 32307 - protein, 19 aa, synthetic construct
  source 1..19: note = Description of Artificial Sequence: Synthetic peptide; note = XENP022385 vhCDR2
EISTKANNHATYYAPSVKG

SEQ ID NO: 32308 - protein, 10 aa, synthetic construct
  source 1..10: note = Description of Artificial Sequence: Synthetic peptide; note = XENP022385 vhCDR3
LATWDWYFDV

SEQ ID NO: 32309 - protein, 218 aa, synthetic construct; identical to SEQ ID NO: 22359
  source 1..218: note = Description of Artificial Sequence: Synthetic polypeptide; note = XENP022385 7G8_H3.35_L1.11_Fab Light Chain

SEQ ID NO: 32310 - protein, 111 aa, synthetic construct; identical to SEQ ID NO: 22360
  source 1..111: note = Description of Artificial Sequence: Synthetic polypeptide; note = VL of XENP022385

SEQ ID NO: 32311 - protein, 15 aa, synthetic construct
  source 1..15: note = Description of Artificial Sequence: Synthetic peptide; note = XENP022385 vlCDR1
RASQSVDYDGDSYMN

SEQ ID NO: 32312 - protein, 7 aa, synthetic construct
  source 1..7: note = Description of Artificial Sequence: Synthetic peptide; note = XENP022385 vlCDR2
AASELES

SEQ ID NO: 32313 - protein, 9 aa, synthetic construct
  source 1..9: note = Description of Artificial Sequence: Synthetic peptide; note = XENP022385 vlCDR3
QQSNEDPFT

SEQ ID NO: 32314 - protein, 226 aa, synthetic construct
  source 1..226: note = Description of Artificial Sequence: Synthetic polypeptide; note = XENP022386 7G8_H3.36_L1.11_Fab Heavy Chain
EVQLVESGGGLVQPGGSLRLSCAASGFTFDDAWMDWVRQAPGKGLEWVAEISTKANNHATYYATSVKGRFTISRDDSKSSVYLQMNSLRAEDTAVYYCTRLATWDWYFDVWGQGTTVTVSSASTKGPSVFPLAPSSKSTSGGTAALGCLVKDYFPEPVTVSWNSGALTSGVHTFPAVLQSSGLYSLSSVVTVPSSSLGTQTYICNVNHKPSNTKVDKKVEPKSCGS

SEQ ID NO: 32315 - protein, 121 aa, synthetic construct
  source 1..121: note = Description of Artificial Sequence: Synthetic polypeptide; note = VH of XENP022386
EVQLVESGGGLVQPGGSLRLSCAASGFTFDDAWMDWVRQAPGKGLEWVAEISTKANNHATYYATSVKGRFTISRDDSKSSVYLQMNSLRAEDTAVYYCTRLATWDWYFDVWGQGTTVTVSS

SEQ ID NO: 32316 - protein, 5 aa, synthetic construct
  source 1..5: note = Description of Artificial Sequence: Synthetic peptide; note = XENP022386 vhCDR1
DAWMD

SEQ ID NO: 32317 - protein, 19 aa, synthetic construct
  source 1..19: note = Description of Artificial Sequence: Synthetic peptide; note = XENP022386 vhCDR2
EISTKANNHATYYATSVKG

SEQ ID NO: 32318 - protein, 10 aa, synthetic construct
  source 1..10: note = Description of Artificial Sequence: Synthetic peptide; note = XENP022386 vhCDR3
LATWDWYFDV

SEQ ID NO: 32319 - protein, 218 aa, synthetic construct; identical to SEQ ID NO: 22359
  source 1..218: note = Description of Artificial Sequence: Synthetic polypeptide; note = XENP022386 7G8_H3.36_L1.11_Fab Light Chain

SEQ ID NO: 32320 - protein, 111 aa, synthetic construct; identical to SEQ ID NO: 22360
  source 1..111: note = Description of Artificial Sequence: Synthetic polypeptide; note = VL of XENP022386

SEQ ID NO: 32321 - protein, 15 aa, synthetic construct
  source 1..15: note = Description of Artificial Sequence: Synthetic peptide; note = XENP022386 vlCDR1
RASQSVDYDGDSYMN

SEQ ID NO: 32322 - protein, 7 aa, synthetic construct
  source 1..7: note = Description of Artificial Sequence: Synthetic peptide; note = XENP022386 vlCDR2
AASELES

SEQ ID NO: 32323 - protein, 9 aa, synthetic construct
  source 1..9: note = Description of Artificial Sequence: Synthetic peptide; note = XENP022386 vlCDR3
QQSNEDPFT

SEQ ID NO: 32324 - protein, 226 aa, synthetic construct
  source 1..226: note = Description of Artificial Sequence: Synthetic polypeptide; note = XENP022387 7G8_H3.37_L1.11_Fab Heavy Chain
EVQLVESGGGLVQPGGSLRLSCAASGFTFDDAWMDWVRQAPGKGLEWVAEISTKANNHATYYADSVKGRFTISRDDSKSSVYLQMNSLRAEDTAVYYCTRLATWDWYFDVWGQGTTVTVSSASTKGPSVFPLAPSSKSTSGGTAALGCLVKDYFPEPVTVSWNSGALTSGVHTFPAVLQSSGLYSLSSVVTVPSSSLGTQTYICNVNHKPSNTKVDKKVEPKSCGS

SEQ ID NO: 32325 - protein, 121 aa, synthetic construct
  source 1..121: note = Description of Artificial Sequence: Synthetic polypeptide; note = VH of XENP022387
EVQLVESGGGLVQPGGSLRLSCAASGFTFDDAWMDWVRQAPGKGLEWVAEISTKANNHATYYADSVKGRFTISRDDSKSSVYLQMNSLRAEDTAVYYCTRLATWDWYFDVWGQGTTVTVSS

SEQ ID NO: 32326 - protein, 5 aa, synthetic construct
  source 1..5: note = Description of Artificial Sequence: Synthetic peptide; note = XENP022387 vhCDR1
DAWMD

SEQ ID NO: 32327 - protein, 19 aa, synthetic construct
  source 1..19: note = Description of Artificial Sequence: Synthetic peptide; note = XENP022387 vhCDR2
EISTKANNHATYYADSVKG

SEQ ID NO: 32328 - protein, 10 aa, synthetic construct
  source 1..10: note = Description of Artificial Sequence: Synthetic peptide; note = XENP022387 vhCDR3
LATWDWYFDV

SEQ ID NO: 32329 - protein, 218 aa, synthetic construct; identical to SEQ ID NO: 22359
  source 1..218: note = Description of Artificial Sequence: Synthetic polypeptide; note = XENP022387 7G8_H3.37_L1.11_Fab Light Chain

SEQ ID NO: 32330 - protein, 111 aa, synthetic construct; identical to SEQ ID NO: 22360
  source 1..111: note = Description of Artificial Sequence: Synthetic polypeptide; note = VL of XENP022387

SEQ ID NO: 32331 - protein, 15 aa, synthetic construct
  source 1..15: note = Description of Artificial Sequence: Synthetic peptide; note = XENP022387 vlCDR1
RASQSVDYDGDSYMN

SEQ ID NO: 32332 - protein, 7 aa, synthetic construct
  source 1..7: note = Description of Artificial Sequence: Synthetic peptide; note = XENP022387 vlCDR2
AASELES

SEQ ID NO: 32333 - protein, 9 aa, synthetic construct
  source 1..9: note = Description of Artificial Sequence: Synthetic peptide; note = XENP022387 vlCDR3
QQSNEDPFT

SEQ ID NO: 32334 - protein, 226 aa, synthetic construct
  source 1..226: note = Description of Artificial Sequence: Synthetic polypeptide; note = XENP022388 7G8_H3.38_L1.11_Fab Heavy Chain
EVQLVESGGGLVQPGGSLRLSCAASGFTFDDAWMDWVRQAPGKGLEWVAEISTKANNHATYYAGSVKGRFTISRDDSKSSVYLQMNSLRAEDTAVYYCTRLATWDWYFDVWGQGTTVTVSSASTKGPSVFPLAPSSKSTSGGTAALGCLVKDYFPEPVTVSWNSGALTSGVHTFPAVLQSSGLYSLSSVVTVPSSSLGTQTYICNVNHKPSNTKVDKKVEPKSCGS

SEQ ID NO: 32335 - protein, 121 aa, synthetic construct
  source 1..121: note = Description of Artificial Sequence: Synthetic polypeptide; note = VH of XENP022388
EVQLVESGGGLVQPGGSLRLSCAASGFTFDDAWMDWVRQAPGKGLEWVAEISTKANNHATYYAGSVKGRFTISRDDSKSSVYLQMNSLRAEDTAVYYCTRLATWDWYFDVWGQGTTVTVSS

SEQ ID NO: 32336 - protein, 5 aa, synthetic construct
  source 1..5: note = Description of Artificial Sequence: Synthetic peptide; note = XENP022388 vhCDR1
DAWMD

SEQ ID NO: 32337 - protein, 19 aa, synthetic construct
  source 1..19: note = Description of Artificial Sequence: Synthetic peptide; note = XENP022388 vhCDR2
EISTKANNHATYYAGSVKG

SEQ ID NO: 32338 - protein, 10 aa, synthetic construct
  source 1..10: note = Description of Artificial Sequence: Synthetic peptide; note = XENP022388 vhCDR3
LATWDWYFDV

SEQ ID NO: 32339 - protein, 218 aa, synthetic construct; identical to SEQ ID NO: 22359
  source 1..218: note = Description of Artificial Sequence: Synthetic polypeptide; note = XENP022388 7G8_H3.38_L1.11_Fab Light Chain

SEQ ID NO: 32340 - protein, 111 aa, synthetic construct; identical to SEQ ID NO: 22360
  source 1..111: note = Description of Artificial Sequence: Synthetic polypeptide; note = VL of XENP022388

SEQ ID NO: 32341 - protein, 15 aa, synthetic construct
  source 1..15: note = Description of Artificial Sequence: Synthetic peptide; note = XENP022388 vlCDR1
RASQSVDYDGDSYMN

SEQ ID NO: 32342 - protein, 7 aa, synthetic construct
  source 1..7: note = Description of Artificial Sequence: Synthetic peptide; note = XENP022388 vlCDR2
AASELES

SEQ ID NO: 32343 - protein, 9 aa, synthetic construct
  source 1..9: note = Description of Artificial Sequence: Synthetic peptide; note = XENP022388 vlCDR3
QQSNEDPFT

SEQ ID NO: 32344 - protein, 226 aa, synthetic construct
  source 1..226: note = Description of Artificial Sequence: Synthetic polypeptide; note = XENP022389 7G8_H3.39_L1.11_Fab Heavy Chain
EVQLVESGGGLVQPGGSLRLSCAASGFTFDDAWMDWVRQAPGKGLEWVAEISTKANNHATYYAASVKGRFTISRDDSKSSVYLQMNSLRAEDTAVYYCTRLATWDWYFDVWGQGTTVTVSSASTKGPSVFPLAPSSKSTSGGTAALGCLVKDYFPEPVTVSWNSGALTSGVHTFPAVLQSSGLYSLSSVVTVPSSSLGTQTYICNVNHKPSNTKVDKKVEPKSCGS

SEQ ID NO: 32345 - protein, 121 aa, synthetic construct
  source 1..121: note = Description of Artificial Sequence: Synthetic polypeptide; note = VH of XENP022389
EVQLVESGGGLVQPGGSLRLSCAASGFTFDDAWMDWVRQAPGKGLEWVAEISTKANNHATYYAASVKGRFTISRDDSKSSVYLQMNSLRAEDTAVYYCTRLATWDWYFDVWGQGTTVTVSS

SEQ ID NO: 32346 - protein, 5 aa, synthetic construct
  source 1..5: note = Description of Artificial Sequence: Synthetic peptide; note = XENP022389 vhCDR1
DAWMD

SEQ ID NO: 32347 - protein, 19 aa, synthetic construct
  source 1..19: note = Description of Artificial Sequence: Synthetic peptide; note = XENP022389 vhCDR2
EISTKANNHATYYAASVKG

SEQ ID NO: 32348 - protein, 10 aa, synthetic construct
  source 1..10: note = Description of Artificial Sequence: Synthetic peptide; note = XENP022389 vhCDR3
LATWDWYFDV

SEQ ID NO: 32349 - protein, 218 aa, synthetic construct; identical to SEQ ID NO: 22359
  source 1..218: note = Description of Artificial Sequence: Synthetic polypeptide; note = XENP022389 7G8_H3.39_L1.11_Fab Light Chain

SEQ ID NO: 32350 - protein, 111 aa, synthetic construct; identical to SEQ ID NO: 22360
  source 1..111: note = Description of Artificial Sequence: Synthetic polypeptide; note = VL of XENP022389

SEQ ID NO: 32351 - protein, 15 aa, synthetic construct
  source 1..15: note = Description of Artificial Sequence: Synthetic peptide; note = XENP022389 vlCDR1
RASQSVDYDGDSYMN

SEQ ID NO: 32352 - protein, 7 aa, synthetic construct
  source 1..7: note = Description of Artificial Sequence: Synthetic peptide; note = XENP022389 vlCDR2
AASELES

SEQ ID NO: 32353 - protein, 9 aa, synthetic construct
  source 1..9: note = Description of Artificial Sequence: Synthetic peptide; note = XENP022389 vlCDR3
QQSNEDPFT

SEQ ID NO: 32354 - protein, 226 aa, synthetic construct
  source 1..226: note = Description of Artificial Sequence: Synthetic polypeptide; note = XENP022390 7G8_H3.40_L1.11_Fab Heavy Chain
EVQLVESGGGLVQPGGSLRLSCAASGFTFDDAWMDWVRQAPGKGLEWVAEISTKANNHATYYAVSVKGRFTISRDDSKSSVYLQMNSLRAEDTAVYYCTRLATWDWYFDVWGQGTTVTVSSASTKGPSVFPLAPSSKSTSGGTAALGCLVKDYFPEPVTVSWNSGALTSGVHTFPAVLQSSGLYSLSSVVTVPSSSLGTQTYICNVNHKPSNTKVDKKVEPKSCGS

SEQ ID NO: 32355 - protein, 121 aa, synthetic construct
  source 1..121: note = Description of Artificial Sequence: Synthetic polypeptide; note = VH of XENP022390
EVQLVESGGGLVQPGGSLRLSCAASGFTFDDAWMDWVRQAPGKGLEWVAEISTKANNHATYYAVSVKGRFTISRDDSKSSVYLQMNSLRAEDTAVYYCTRLATWDWYFDVWGQGTTVTVSS

SEQ ID NO: 32356 - protein, 5 aa, synthetic construct
  source 1..5: note = Description of Artificial Sequence: Synthetic peptide; note = XENP022390 vhCDR1
DAWMD

SEQ ID NO: 32357 - protein, 19 aa, synthetic construct
  source 1..19: note = Description of Artificial Sequence: Synthetic peptide; note = XENP022390 vhCDR2
EISTKANNHATYYAVSVKG

SEQ ID NO: 32358 - protein, 10 aa, synthetic construct
  source 1..10: note = Description of Artificial Sequence: Synthetic peptide; note = XENP022390 vhCDR3
LATWDWYFDV

SEQ ID NO: 32359 - protein, 218 aa, synthetic construct; identical to SEQ ID NO: 22359
  source 1..218: note = Description of Artificial Sequence: Synthetic polypeptide; note = XENP022390 7G8_H3.40_L1.11_Fab Light Chain

SEQ ID NO: 32360 - protein, 111 aa, synthetic construct; identical to SEQ ID NO: 22360
  source 1..111: note = Description of Artificial Sequence: Synthetic polypeptide; note = VL of XENP022390

SEQ ID NO: 32361 - protein, 15 aa, synthetic construct
  source 1..15: note = Description of Artificial Sequence: Synthetic peptide; note = XENP022390 vlCDR1
RASQSVDYDGDSYMN

SEQ ID NO: 32362 - protein, 7 aa, synthetic construct
  source 1..7: note = Description of Artificial Sequence: Synthetic peptide; note = XENP022390 vlCDR2
AASELES

SEQ ID NO: 32363 - protein, 9 aa, synthetic construct
  source 1..9: note = Description of Artificial Sequence: Synthetic peptide; note = XENP022390 vlCDR3
QQSNEDPFT

SEQ ID NO: 32364 - protein, 226 aa, synthetic construct
  source 1..226: note = Description of Artificial Sequence: Synthetic polypeptide; note = XENP022391 7G8_H3.41_L1.11_Fab Heavy Chain
EVQLVESGGGLVQPGGSLRLSCAASGFTFDDAWMDWVRQAPGKGLEWVAEISTKANNHATYYAESVKGRFTISRDTSKSSVYLQMNSLRAEDTAVYYCTRLATWDWYFDVWGQGTTVTVSSASTKGPSVFPLAPSSKSTSGGTAALGCLVKDYFPEPVTVSWNSGALTSGVHTFPAVLQSSGLYSLSSVVTVPSSSLGTQTYICNVNHKPSNTKVDKKVEPKSCGS

SEQ ID NO: 32365 - protein, 121 aa, synthetic construct
  source 1..121: note = Description of Artificial Sequence: Synthetic polypeptide; note = VH of XENP022391
EVQLVESGGGLVQPGGSLRLSCAASGFTFDDAWMDWVRQAPGKGLEWVAEISTKANNHATYYAESVKGRFTISRDTSKSSVYLQMNSLRAEDTAVYYCTRLATWDWYFDVWGQGTTVTVSS

SEQ ID NO: 32366 - protein, 5 aa, synthetic construct
  source 1..5: note = Description of Artificial Sequence: Synthetic peptide; note = XENP022391 vhCDR1
DAWMD

SEQ ID NO: 32367 - protein, 19 aa, synthetic construct
  source 1..19: note = Description of Artificial Sequence: Synthetic peptide; note = XENP022391 vhCDR2
EISTKANNHATYYAESVKG

SEQ ID NO: 32368 - protein, 10 aa, synthetic construct
  source 1..10: note = Description of Artificial Sequence: Synthetic peptide; note = XENP022391 vhCDR3
LATWDWYFDV

SEQ ID NO: 32369 - protein, 218 aa, synthetic construct; identical to SEQ ID NO: 22359
  source 1..218: note = Description of Artificial Sequence: Synthetic polypeptide; note = XENP022391 7G8_H3.41_L1.11_Fab Light Chain

SEQ ID NO: 32370 - protein, 111 aa, synthetic construct; identical to SEQ ID NO: 22360
  source 1..111: note = Description of Artificial Sequence: Synthetic polypeptide; note = VL of XENP022391

SEQ ID NO: 32371 - protein, 15 aa, synthetic construct
  source 1..15: note = Description of Artificial Sequence: Synthetic peptide; note = XENP022391 vlCDR1
RASQSVDYDGDSYMN

SEQ ID NO: 32372 - protein, 7 aa, synthetic construct
  source 1..7: note = Description of Artificial Sequence: Synthetic peptide; note = XENP022391 vlCDR2
AASELES

SEQ ID NO: 32373 - protein, 9 aa, synthetic construct
  source 1..9: note = Description of Artificial Sequence: Synthetic peptide; note = XENP022391 vlCDR3
QQSNEDPFT

SEQ ID NO: 32374 - protein, 226 aa, synthetic construct
  source 1..226: note = Description of Artificial Sequence: Synthetic polypeptide; note = XENP022392 7G8_H3.42_L1.11_Fab Heavy Chain
EVQLVESGGGLVQPGGSLRLSCAASGFTFDDAWMDWVRQAPGKGLEWVAEISTKANNHATYYAESVKGRFTISRDRSKSSVYLQMNSLRAEDTAVYYCTRLATWDWYFDVWGQGTTVTVSSASTKGPSVFPLAPSSKSTSGGTAALGCLVKDYFPEPVTVSWNSGALTSGVHTFPAVLQSSGLYSLSSVVTVPSSSLGTQTYICNVNHKPSNTKVDKKVEPKSCGS

SEQ ID NO: 32375 - protein, 121 aa, synthetic construct
  source 1..121: note = Description of Artificial Sequence: Synthetic polypeptide; note = VH of XENP022392
EVQLVESGGGLVQPGGSLRLSCAASGFTFDDAWMDWVRQAPGKGLEWVAEISTKANNHATYYAESVKGRFTISRDRSKSSVYLQMNSLRAEDTAVYYCTRLATWDWYFDVWGQGTTVTVSS

SEQ ID NO: 32376 - protein, 5 aa, synthetic construct
  source 1..5: note = Description of Artificial Sequence: Synthetic peptide; note = XENP022392 vhCDR1
DAWMD

SEQ ID NO: 32377 - protein, 19 aa, synthetic construct
  source 1..19: note = Description of Artificial Sequence: Synthetic peptide; note = XENP022392 vhCDR2
EISTKANNHATYYAESVKG

SEQ ID NO: 32378 - protein, 10 aa, synthetic construct
  source 1..10: note = Description of Artificial Sequence: Synthetic peptide; note = XENP022392 vhCDR3
LATWDWYFDV

SEQ ID NO: 32379 - protein, 218 aa, synthetic construct; identical to SEQ ID NO: 22359
  source 1..218: note = Description of Artificial Sequence: Synthetic polypeptide; note = XENP022392 7G8_H3.42_L1.11_Fab Light Chain

SEQ ID NO: 32380 - protein, 111 aa, synthetic construct; identical to SEQ ID NO: 22360
  source 1..111: note = Description of Artificial Sequence: Synthetic polypeptide; note = VL of XENP022392

SEQ ID NO: 32381 - protein, 15 aa, synthetic construct
  source 1..15: note = Description of Artificial Sequence: Synthetic peptide; note = XENP022392 vlCDR1
RASQSVDYDGDSYMN

SEQ ID NO: 32382 - protein, 7 aa, synthetic construct
  source 1..7: note = Description of Artificial Sequence: Synthetic peptide; note = XENP022392 vlCDR2
AASELES

SEQ ID NO: 32383 - protein, 9 aa, synthetic construct
  source 1..9: note = Description of Artificial Sequence: Synthetic peptide; note = XENP022392 vlCDR3
QQSNEDPFT

SEQ ID NO: 32384 - protein, 226 aa, synthetic construct
  source 1..226: note = Description of Artificial Sequence: Synthetic polypeptide; note = XENP022393 7G8_H3.43_L1.11_Fab Heavy Chain
EVQLVESGGGLVQPGGSLRLSCAASGFTFDDAWMDWVRQAPGKGLEWVAEISTKANNHATYYAESVKGRFTISRDMSKSSVYLQMNSLRAEDTAVYYCTRLATWDWYFDVWGQGTTVTVSSASTKGPSVFPLAPSSKSTSGGTAALGCLVKDYFPEPVTVSWNSGALTSGVHTFPAVLQSSGLYSLSSVVTVPSSSLGTQTYICNVNHKPSNTKVDKKVEPKSCGS

SEQ ID NO: 32385 - protein, 121 aa, synthetic construct
  source 1..121: note = Description of Artificial Sequence: Synthetic polypeptide; note = VH of XENP022393
EVQLVESGGGLVQPGGSLRLSCAASGFTFDDAWMDWVRQAPGKGLEWVAEISTKANNHATYYAESVKGRFTISRDMSKSSVYLQMNSLRAEDTAVYYCTRLATWDWYFDVWGQGTTVTVSS

SEQ ID NO: 32386 - protein, 5 aa, synthetic construct
  source 1..5: note = Description of Artificial Sequence: Synthetic peptide; note = XENP022393 vhCDR1
DAWMD

SEQ ID NO: 32387 - protein, 19 aa, synthetic construct
  source 1..19: note = Description of Artificial Sequence: Synthetic peptide; note = XENP022393 vhCDR2
EISTKANNHATYYAESVKG

SEQ ID NO: 32388 - protein, 10 aa, synthetic construct
  source 1..10: note = Description of Artificial Sequence: Synthetic peptide; note = XENP022393 vhCDR3
LATWDWYFDV

SEQ ID NO: 32389 - protein, 218 aa, synthetic construct; identical to SEQ ID NO: 22359
  source 1..218: note = Description of Artificial Sequence: Synthetic polypeptide; note = XENP022393 7G8_H3.43_L1.11_Fab Light Chain

SEQ ID NO: 32390 - protein, 111 aa, synthetic construct; identical to SEQ ID NO: 22360
  source 1..111: note = Description of Artificial Sequence: Synthetic polypeptide; note = VL of XENP022393

SEQ ID NO: 32391 - protein, 15 aa, synthetic construct
  source 1..15: note = Description of Artificial Sequence: Synthetic peptide; note = XENP022393 vlCDR1
RASQSVDYDGDSYMN

SEQ ID NO: 32392 - protein, 7 aa, synthetic construct
  source 1..7: note = Description of Artificial Sequence: Synthetic peptide; note = XENP022393 vlCDR2
AASELES

SEQ ID NO: 32393 - protein, 9 aa, synthetic construct
  source 1..9: note = Description of Artificial Sequence: Synthetic peptide; note = XENP022393 vlCDR3
QQSNEDPFT

SEQ ID NO: 32394 - protein, 226 aa, synthetic construct
  source 1..226: note = Description of Artificial Sequence: Synthetic polypeptide; note = XENP022394 7G8_H3.44_L1.11_Fab Heavy Chain
EVQLVESGGGLVQPGGSLRLSCAASGFTFDDAWMDWVRQAPGKGLEWVAEISTKANNHATYYAESVKGRFTISRDESKSSVYLQMNSLRAEDTAVYYCTRLATWDWYFDVWGQGTTVTVSSASTKGPSVFPLAPSSKSTSGGTAALGCLVKDYFPEPVTVSWNSGALTSGVHTFPAVLQSSGLYSLSSVVTVPSSSLGTQTYICNVNHKPSNTKVDKKVEPKSCGS

SEQ ID NO: 32395 - protein, 121 aa, synthetic construct
  source 1..121: note = Description of Artificial Sequence: Synthetic polypeptide; note = VH of XENP022394
EVQLVESGGGLVQPGGSLRLSCAASGFTFDDAWMDWVRQAPGKGLEWVAEISTKANNHATYYAESVKGRFTISRDESKSSVYLQMNSLRAEDTAVYYCTRLATWDWYFDVWGQGTTVTVSS

SEQ ID NO: 32396 - protein, 5 aa, synthetic construct
  source 1..5: note = Description of Artificial Sequence: Synthetic peptide; note = XENP022394 vhCDR1
DAWMD

SEQ ID NO: 32397 - protein, 19 aa, synthetic construct
  source 1..19: note = Description of Artificial Sequence: Synthetic peptide; note = XENP022394 vhCDR2
EISTKANNHATYYAESVKG

SEQ ID NO: 32398 - protein, 10 aa, synthetic construct
  source 1..10: note = Description of Artificial Sequence: Synthetic peptide; note = XENP022394 vhCDR3
LATWDWYFDV

SEQ ID NO: 32399 - protein, 218 aa, synthetic construct; identical to SEQ ID NO: 22359
  source 1..218: note = Description of Artificial Sequence: Synthetic polypeptide; note = XENP022394 7G8_H3.44_L1.11_Fab Light Chain

SEQ ID NO: 32400 - protein, 111 aa, synthetic construct; identical to SEQ ID NO: 22360
  source 1..111: note = Description of Artificial Sequence: Synthetic polypeptide; note = VL of XENP022394

SEQ ID NO: 32401 - protein, 15 aa, synthetic construct
  source 1..15: note = Description of Artificial Sequence: Synthetic peptide; note = XENP022394 vlCDR1
RASQSVDYDGDSYMN

SEQ ID NO: 32402 - protein, 7 aa, synthetic construct
  source 1..7: note = Description of Artificial Sequence: Synthetic peptide; note = XENP022394 vlCDR2
AASELES

SEQ ID NO: 32403 - protein, 9 aa, synthetic construct
  source 1..9: note = Description of Artificial Sequence: Synthetic peptide; note = XENP022394 vlCDR3
QQSNEDPFT

SEQ ID NO: 32404 - protein, 226 aa, synthetic construct
  source 1..226: note = Description of Artificial Sequence: Synthetic polypeptide; note = XENP022395 7G8_H3.45_L1.11_Fab Heavy Chain
EVQLVESGGGLVQPGGSLRLSCAASGFTFDDAWMDWVRQAPGKGLEWVAEISTKANNHATYYAESVKGRFTISRDNSKSSVYLQMNSLRAEDTAVYYCTRLATWDWYFDVWGQGTTVTVSSASTKGPSVFPLAPSSKSTSGGTAALGCLVKDYFPEPVTVSWNSGALTSGVHTFPAVLQSSGLYSLSSVVTVPSSSLGTQTYICNVNHKPSNTKVDKKVEPKSCGS

SEQ ID NO: 32405 - protein, 121 aa, synthetic construct
  source 1..121: note = Description of Artificial Sequence: Synthetic polypeptide; note = VH of XENP022395
EVQLVESGGGLVQPGGSLRLSCAASGFTFDDAWMDWVRQAPGKGLEWVAEISTKANNHATYYAESVKGRFTISRDNSKSSVYLQMNSLRAEDTAVYYCTRLATWDWYFDVWGQGTTVTVSS

SEQ ID NO: 32406 - protein, 5 aa, synthetic construct
  source 1..5: note = Description of Artificial Sequence: Synthetic peptide; note = XENP022395 vhCDR1
DAWMD

SEQ ID NO: 32407 - protein, 19 aa, synthetic construct
  source 1..19: note = Description of Artificial Sequence: Synthetic peptide; note = XENP022395 vhCDR2
EISTKANNHATYYAESVKG

SEQ ID NO: 32408 - protein, 10 aa, synthetic construct
  source 1..10: note = Description of Artificial Sequence: Synthetic peptide; note = XENP022395 vhCDR3
LATWDWYFDV

SEQ ID NO: 32409 - protein, 218 aa, synthetic construct; identical to SEQ ID NO: 22359
  source 1..218: note = Description of Artificial Sequence: Synthetic polypeptide; note = XENP022395 7G8_H3.45_L1.11_Fab Light Chain

SEQ ID NO: 32410 - protein, 111 aa, synthetic construct; identical to SEQ ID NO: 22360
  source 1..111: note = Description of Artificial Sequence: Synthetic polypeptide; note = VL of XENP022395

SEQ ID NO: 32411 - protein, 15 aa, synthetic construct
  source 1..15: note = Description of Artificial Sequence: Synthetic peptide; note = XENP022395 vlCDR1
RASQSVDYDGDSYMN

SEQ ID NO: 32412 - protein, 7 aa, synthetic construct
  source 1..7: note = Description of Artificial Sequence: Synthetic peptide; note = XENP022395 vlCDR2
AASELES

SEQ ID NO: 32413 - protein, 9 aa, synthetic construct
  source 1..9: note = Description of Artificial Sequence: Synthetic peptide; note = XENP022395 vlCDR3
QQSNEDPFT

SEQ ID NO: 32414 - protein, 226 aa, synthetic construct
  source 1..226: note = Description of Artificial Sequence: Synthetic polypeptide; note = XENP022396 7G8_H3.46_L1.11_Fab Heavy Chain
EVQLVESGGGLVQPGGSLRLSCAASGFTFDDAWMDWVRQAPGKGLEWVAEISTKANNHATYYAESVKGRFTISRDKSKSSVYLQMNSLRAEDTAVYYCTRLATWDWYFDVWGQGTTVTVSSASTKGPSVFPLAPSSKSTSGGTAALGCLVKDYFPEPVTVSWNSGALTSGVHTFPAVLQSSGLYSLSSVVTVPSSSLGTQTYICNVNHKPSNTKVDKKVEPKSCGS

SEQ ID NO: 32415 - protein, 121 aa, synthetic construct
  source 1..121: note = Description of Artificial Sequence: Synthetic polypeptide; note = VH of XENP022396
EVQLVESGGGLVQPGGSLRLSCAASGFTFDDAWMDWVRQAPGKGLEWVAEISTKANNHATYYAESVKGRFTISRDKSKSSVYLQMNSLRAEDTAVYYCTRLATWDWYFDVWGQGTTVTVSS

SEQ ID NO: 32416 - protein, 5 aa, synthetic construct
  source 1..5: note = Description of Artificial Sequence: Synthetic peptide; note = XENP022396 vhCDR1
DAWMD

SEQ ID NO: 32417 - protein, 19 aa, synthetic construct
  source 1..19: note = Description of Artificial Sequence: Synthetic peptide; note = XENP022396 vhCDR2
EISTKANNHATYYAESVKG

SEQ ID NO: 32418 - protein, 10 aa, synthetic construct
  source 1..10: note = Description of Artificial Sequence: Synthetic peptide; note = XENP022396 vhCDR3
LATWDWYFDV

SEQ ID NO: 32419 - protein, 218 aa, synthetic construct; identical to SEQ ID NO: 22359
  source 1..218: note = Description of Artificial Sequence: Synthetic polypeptide; note = XENP022396 7G8_H3.46_L1.11_Fab Light Chain

SEQ ID NO: 32420 - protein, 111 aa, synthetic construct; identical to SEQ ID NO: 22360
  source 1..111: note = Description of Artificial Sequence: Synthetic polypeptide; note = VL of XENP022396

SEQ ID NO: 32421 - protein, 15 aa, synthetic construct
  source 1..15: note = Description of Artificial Sequence: Synthetic peptide; note = XENP022396 vlCDR1
RASQSVDYDGDSYMN

SEQ ID NO: 32422 - protein, 7 aa, synthetic construct
  source 1..7: note = Description of Artificial Sequence: Synthetic peptide; note = XENP022396 vlCDR2
AASELES

SEQ ID NO: 32423 - protein, 9 aa, synthetic construct
  source 1..9: note = Description of Artificial Sequence: Synthetic peptide; note = XENP022396 vlCDR3
QQSNEDPFT

SEQ ID NO: 32424 - protein, 226 aa, synthetic construct
  source 1..226: note = Description of Artificial Sequence: Synthetic polypeptide; note = XENP022401 7G8_H3.47_L1.11_Fab Heavy Chain
EVQLVESGGGLVQPGGSLRLSCAASGFTFDDAWMDWVRQAPGKGLEWVAEISTKANNHATYYAESVKGRFTISRDDSKSTVYLQMNSLRAEDTAVYYCTRLATWDWYFDVWGQGTTVTVSSASTKGPSVFPLAPSSKSTSGGTAALGCLVKDYFPEPVTVSWNSGALTSGVHTFPAVLQSSGLYSLSSVVTVPSSSLGTQTYICNVNHKPSNTKVDKKVEPKSCGS

SEQ ID NO: 32425 - protein, 121 aa, synthetic construct
  source 1..121: note = Description of Artificial Sequence: Synthetic polypeptide; note = VH of XENP022401
EVQLVESGGGLVQPGGSLRLSCAASGFTFDDAWMDWVRQAPGKGLEWVAEISTKANNHATYYAESVKGRFTISRDDSKSTVYLQMNSLRAEDTAVYYCTRLATWDWYFDVWGQGTTVTVSS

SEQ ID NO: 32426 - protein, 5 aa, synthetic construct
  source 1..5: note = Description of Artificial Sequence: Synthetic peptide; note = XENP022401 vhCDR1
DAWMD

SEQ ID NO: 32427 - protein, 19 aa, synthetic construct
  source 1..19: note = Description of Artificial Sequence: Synthetic peptide; note = XENP022401 vhCDR2
EISTKANNHATYYAESVKG

SEQ ID NO: 32428 - protein, 10 aa, synthetic construct
  source 1..10: note = Description of Artificial Sequence: Synthetic peptide; note = XENP022401 vhCDR3
LATWDWYFDV

SEQ ID NO: 32429 - protein, 218 aa, synthetic construct; identical to SEQ ID NO: 22359
  source 1..218: note = Description of Artificial Sequence: Synthetic polypeptide; note = XENP022401 7G8_H3.47_L1.11_Fab Light Chain

SEQ ID NO: 32430 - protein, 111 aa, synthetic construct; identical to SEQ ID NO: 22360
  source 1..111: note = Description of Artificial Sequence: Synthetic polypeptide; note = VL of XENP022401

SEQ ID NO: 32431 - protein, 15 aa, synthetic construct
  source 1..15: note = Description of Artificial Sequence: Synthetic peptide; note = XENP022401 vlCDR1
RASQSVDYDGDSYMN

SEQ ID NO: 32432 - protein, 7 aa, synthetic construct
  source 1..7: note = Description of Artificial Sequence: Synthetic peptide; note = XENP022401 vlCDR2
AASELES

SEQ ID NO: 32433 - protein, 9 aa, synthetic construct
  source 1..9: note = Description of Artificial Sequence: Synthetic peptide; note = XENP022401 vlCDR3
QQSNEDPFT

SEQ ID NO: 32434 - protein, 226 aa, synthetic construct
  source 1..226: note = Description of Artificial Sequence: Synthetic polypeptide; note = XENP022402 7G8_H3.48_L1.11_Fab Heavy Chain
EVQLVESGGGLVQPGGSLRLSCAASGFTFDDAWMDWVRQAPGKGLEWVAEISTKANNHATYYAESVKGRFTISRDDSKSQVYLQMNSLRAEDTAVYYCTRLATWDWYFDVWGQGTTVTVSSASTKGPSVFPLAPSSKSTSGGTAALGCLVKDYFPEPVTVSWNSGALTSGVHTFPAVLQSSGLYSLSSVVTVPSSSLGTQTYICNVNHKPSNTKVDKKVEPKSCGS

SEQ ID NO: 32435 - protein, 121 aa, synthetic construct
  source 1..121: note = Description of Artificial Sequence: Synthetic polypeptide; note = VH of XENP022402
EVQLVESGGGLVQPGGSLRLSCAASGFTFDDAWMDWVRQAPGKGLEWVAEISTKANNHATYYAESVKGRFTISRDDSKSQVYLQMNSLRAEDTAVYYCTRLATWDWYFDVWGQGTTVTVSS

SEQ ID NO: 32436 - protein, 5 aa, synthetic construct
  source 1..5: note = Description of Artificial Sequence: Synthetic peptide; note = XENP022402 vhCDR1
DAWMD

SEQ ID NO: 32437 - protein, 19 aa, synthetic construct
  source 1..19: note = Description of Artificial Sequence: Synthetic peptide; note = XENP022402 vhCDR2
EISTKANNHATYYAESVKG

SEQ ID NO: 32438 - protein, 10 aa, synthetic construct
  source 1..10: note = Description of Artificial Sequence: Synthetic peptide; note = XENP022402 vhCDR3
LATWDWYFDV

SEQ ID NO: 32439 - protein, 218 aa, synthetic construct; identical to SEQ ID NO: 22359
  source 1..218: note = Description of Artificial Sequence: Synthetic polypeptide; note = XENP022402 7G8_H3.48_L1.11_Fab Light Chain

SEQ ID NO: 32440 - protein, 111 aa, synthetic construct; identical to SEQ ID NO: 22360
  source 1..111: note = Description of Artificial Sequence: Synthetic polypeptide; note = VL of XENP022402

SEQ ID NO: 32441 - protein, 15 aa, synthetic construct
  source 1..15: note = Description of Artificial Sequence: Synthetic peptide; note = XENP022402 vlCDR1
RASQSVDYDGDSYMN

SEQ ID NO: 32442 - protein, 7 aa, synthetic construct
  source 1..7: note = Description of Artificial Sequence: Synthetic peptide; note = XENP022402 vlCDR2
AASELES

SEQ ID NO: 32443 - protein, 9 aa, synthetic construct
  source 1..9: note = Description of Artificial Sequence: Synthetic peptide; note = XENP022402 vlCDR3
QQSNEDPFT

SEQ ID NO: 32444 - protein, 226 aa, synthetic construct
  source 1..226: note = Description of Artificial Sequence: Synthetic polypeptide; note = XENP022403 7G8_H3.49_L1.11_Fab Heavy Chain
EVQLVESGGGLVQPGGSLRLSCAASGFTFDDAWMDWVRQAPGKGLEWVAEISTKANNHATYYAESVKGRFTISRDDSKSIVYLQMNSLRAEDTAVYYCTRLATWDWYFDVWGQGTTVTVSSASTKGPSVFPLAPSSKSTSGGTAALGCLVKDYFPEPVTVSWNSGALTSGVHTFPAVLQSSGLYSLSSVVTVPSSSLGTQTYICNVNHKPSNTKVDKKVEPKSCGS

SEQ ID NO: 32445 - protein, 121 aa, synthetic construct
  source 1..121: note = Description of Artificial Sequence: Synthetic polypeptide; note = VH of XENP022403
EVQLVESGGGLVQPGGSLRLSCAASGFTFDDAWMDWVRQAPGKGLEWVAEISTKANNHATYYAESVKGRFTISRDDSKSIVYLQMNSLRAEDTAVYYCTRLATWDWYFDVWGQGTTVTVSS

SEQ ID NO: 32446 - protein, 5 aa, synthetic construct
  source 1..5: note = Description of Artificial Sequence: Synthetic peptide; note = XENP022403 vhCDR1
DAWMD

SEQ ID NO: 32447 - protein, 19 aa, synthetic construct
  source 1..19: note = Description of Artificial Sequence: Synthetic peptide; note = XENP022403 vhCDR2
EISTKANNHATYYAESVKG

SEQ ID NO: 32448 - protein, 10 aa, synthetic construct
  source 1..10: note = Description of Artificial Sequence: Synthetic peptide; note = XENP022403 vhCDR3
LATWDWYFDV

SEQ ID NO: 32449 - protein, 218 aa, synthetic construct; identical to SEQ ID NO: 22359
  source 1..218: note = Description of Artificial Sequence: Synthetic polypeptide; note = XENP022403 7G8_H3.49_L1.11_Fab Light Chain

SEQ ID NO: 32450 - protein, 111 aa, synthetic construct; identical to SEQ ID NO: 22360
  source 1..111: note = Description of Artificial Sequence: Synthetic polypeptide; note = VL of XENP022403

SEQ ID NO: 32451 - protein, 15 aa, synthetic construct
  source 1..15: note = Description of Artificial Sequence: Synthetic peptide; note = XENP022403 vlCDR1
RASQSVDYDGDSYMN

SEQ ID NO: 32452 - protein, 7 aa, synthetic construct
  source 1..7: note = Description of Artificial Sequence: Synthetic peptide; note = XENP022403 vlCDR2
AASELES

SEQ ID NO: 32453 - protein, 9 aa, synthetic construct
  source 1..9: note = Description of Artificial Sequence: Synthetic peptide; note = XENP022403 vlCDR3
QQSNEDPFT

SEQ ID NO: 32454 - protein, 226 aa, synthetic construct
  source 1..226: note = Description of Artificial Sequence: Synthetic polypeptide; note = XENP022404 7G8_H3.50_L1.11_Fab Heavy Chain
EVQLVESGGGLVQPGGSLRLSCAASGFTFDDAWMDWVRQAPGKGLEWVAEISTKANNHATYYAESVKGRFTISRDDSKSSAYLQMNSLRAEDTAVYYCTRLATWDWYFDVWGQGTTVTVSSASTKGPSVFPLAPSSKSTSGGTAALGCLVKDYFPEPVTVSWNSGALTSGVHTFPAVLQSSGLYSLSSVVTVPSSSLGTQTYICNVNHKPSNTKVDKKVEPKSCGS

SEQ ID NO: 32455 - protein, 121 aa, synthetic construct
  source 1..121: note = Description of Artificial Sequence: Synthetic polypeptide; note = VH of XENP022404
EVQLVESGGGLVQPGGSLRLSCAASGFTFDDAWMDWVRQAPGKGLEWVAEISTKANNHATYYAESVKGRFTISRDDSKSSAYLQMNSLRAEDTAVYYCTRLATWDWYFDVWGQGTTVTVSS

SEQ ID NO: 32456 - protein, 5 aa, synthetic construct
  source 1..5: note = Description of Artificial Sequence: Synthetic peptide; note = XENP022404 vhCDR1
DAWMD

SEQ ID NO: 32457 - protein, 19 aa, synthetic construct
  source 1..19: note = Description of Artificial Sequence: Synthetic peptide; note = XENP022404 vhCDR2
EISTKANNHATYYAESVKG

SEQ ID NO: 32458 - protein, 10 aa, synthetic construct
  source 1..10: note = Description of Artificial Sequence: Synthetic peptide; note = XENP022404 vhCDR3
LATWDWYFDV

SEQ ID NO: 32459 - protein, 218 aa, synthetic construct; identical to SEQ ID NO: 22359
  source 1..218: note = Description of Artificial Sequence: Synthetic polypeptide; note = XENP022404 7G8_H3.50_L1.11_Fab Light Chain

SEQ ID NO: 32460 - protein, 111 aa, synthetic construct; identical to SEQ ID NO: 22360
  source 1..111: note = Description of Artificial Sequence: Synthetic polypeptide; note = VL of XENP022404

SEQ ID NO: 32461 - protein, 15 aa, synthetic construct
  source 1..15: note = Description of Artificial Sequence: Synthetic peptide; note = XENP022404 vlCDR1
RASQSVDYDGDSYMN

SEQ ID NO: 32462 - protein, 7 aa, synthetic construct
  source 1..7: note = Description of Artificial Sequence: Synthetic peptide; note = XENP022404 vlCDR2
AASELES

SEQ ID NO: 32463 - protein, 9 aa, synthetic construct
  source 1..9: note = Description of Artificial Sequence: Synthetic peptide; note = XENP022404 vlCDR3
QQSNEDPFT

SEQ ID NO: 32464 - protein, 226 aa, synthetic construct
  source 1..226: note = Description of Artificial Sequence: Synthetic polypeptide; note = XENP022405 7G8_H3.51_L1.11_Fab Heavy Chain
EVQLVESGGGLVQPGGSLRLSCAASGFTFDDAWMDWVRQAPGKGLEWVAEISTKANNHATYYAESVKGRFTISRDDSKSSLYLQMNSLRAEDTAVYYCTRLATWDWYFDVWGQGTTVTVSSASTKGPSVFPLAPSSKSTSGGTAALGCLVKDYFPEPVTVSWNSGALTSGVHTFPAVLQSSGLYSLSSVVTVPSSSLGTQTYICNVNHKPSNTKVDKKVEPKSCGS

SEQ ID NO: 32465 - protein, 121 aa, synthetic construct
  source 1..121: note = Description of Artificial Sequence: Synthetic polypeptide; note = VH of XENP022405
EVQLVESGGGLVQPGGSLRLSCAASGFTFDDAWMDWVRQAPGKGLEWVAEISTKANNHATYYAESVKGRFTISRDDSKSSLYLQMNSLRAEDTAVYYCTRLATWDWYFDVWGQGTTVTVSS

SEQ ID NO: 32466 - protein, 5 aa, synthetic construct
  source 1..5: note = Description of Artificial Sequence: Synthetic peptide; note = XENP022405 vhCDR1
DAWMD

SEQ ID NO: 32467 - protein, 19 aa, synthetic construct
  source 1..19: note = Description of Artificial Sequence: Synthetic peptide; note = XENP022405 vhCDR2
EISTKANNHATYYAESVKG

SEQ ID NO: 32468 - protein, 10 aa, synthetic construct
  source 1..10: note = Description of Artificial Sequence: Synthetic peptide; note = XENP022405 vhCDR3
LATWDWYFDV

SEQ ID NO: 32469 - protein, 218 aa, synthetic construct; identical to SEQ ID NO: 22359
  source 1..218: note = Description of Artificial Sequence: Synthetic polypeptide; note = XENP022405 7G8_H3.51_L1.11_Fab Light Chain

SEQ ID NO: 32470 - protein, 111 aa, synthetic construct; identical to SEQ ID NO: 22360
  source 1..111: note = Description of Artificial Sequence: Synthetic polypeptide; note = VL of XENP022405

SEQ ID NO: 32471 - protein, 15 aa, synthetic construct
  source 1..15: note = Description of Artificial Sequence: Synthetic peptide; note = XENP022405 vlCDR1
RASQSVDYDGDSYMN

SEQ ID NO: 32472 - protein, 7 aa, synthetic construct
  source 1..7: note = Description of Artificial Sequence: Synthetic peptide; note = XENP022405 vlCDR2
AASELES

SEQ ID NO: 32473 - protein, 9 aa, synthetic construct
  source 1..9: note = Description of Artificial Sequence: Synthetic peptide; note = XENP022405 vlCDR3
QQSNEDPFT

SEQ ID NO: 32474 - protein, 226 aa, synthetic construct
  source 1..226: note = Description of Artificial Sequence: Synthetic polypeptide; note = XENP022406 7G8_H3.52_L1.11_Fab Heavy Chain
EVQLVESGGGLVQPGGSLRLSCAASGFTFDDAWMDWVRQAPGKGLEWVAEISTKANNHATYYAESVKGRFTISRDDSKSSFYLQMNSLRAEDTAVYYCTRLATWDWYFDVWGQGTTVTVSSASTKGPSVFPLAPSSKSTSGGTAALGCLVKDYFPEPVTVSWNSGALTSGVHTFPAVLQSSGLYSLSSVVTVPSSSLGTQTYICNVNHKPSNTKVDKKVEPKSCGS

SEQ ID NO: 32475 - protein, 121 aa, synthetic construct
  source 1..121: note = Description of Artificial Sequence: Synthetic polypeptide; note = VH of XENP022406
EVQLVESGGGLVQPGGSLRLSCAASGFTFDDAWMDWVRQAPGKGLEWVAEISTKANNHATYYAESVKGRFTISRDDSKSSFYLQMNSLRAEDTAVYYCTRLATWDWYFDVWGQGTTVTVSS

SEQ ID NO: 32476 - protein, 5 aa, synthetic construct
  source 1..5: note = Description of Artificial Sequence: Synthetic peptide; note = XENP022406 vhCDR1
DAWMD

SEQ ID NO: 32477 - protein, 19 aa, synthetic construct
  source 1..19: note = Description of Artificial Sequence: Synthetic peptide; note = XENP022406 vhCDR2
EISTKANNHATYYAESVKG

SEQ ID NO: 32478 - protein, 10 aa, synthetic construct
  source 1..10: note = Description of Artificial Sequence: Synthetic peptide; note = XENP022406 vhCDR3
LATWDWYFDV

SEQ ID NO: 32479 - protein, 218 aa, synthetic construct; identical to SEQ ID NO: 22359
  source 1..218: note = Description of Artificial Sequence: Synthetic polypeptide; note = XENP022406 7G8_H3.52_L1.11_Fab Light Chain

SEQ ID NO: 32480 - protein, 111 aa, synthetic construct; identical to SEQ ID NO: 22360
  source 1..111: note = Description of Artificial Sequence: Synthetic polypeptide; note = VL of XENP022406

SEQ ID NO: 32481 - protein, 15 aa, synthetic construct
  source 1..15: note = Description of Artificial Sequence: Synthetic peptide; note = XENP022406 vlCDR1
RASQSVDYDGDSYMN

SEQ ID NO: 32482 - protein, 7 aa, synthetic construct
  source 1..7: note = Description of Artificial Sequence: Synthetic peptide; note = XENP022406 vlCDR2
AASELES

SEQ ID NO: 32483 - protein, 9 aa, synthetic construct
  source 1..9: note = Description of Artificial Sequence: Synthetic peptide; note = XENP022406 vlCDR3
QQSNEDPFT

SEQ ID NO: 32484 - protein, 226 aa, synthetic construct
  source 1..226: note = Description of Artificial Sequence: Synthetic polypeptide; note = XENP022407 7G8_H3.53_L1.11_Fab Heavy Chain
EVQLVESGGGLVQPGGSLRLSCAASGFTFDDAWMDWVRQAPGKGLEWVAEISTKANNHATYYAESVKGRFTISRDDSKSSVYLQMNSLRAEDTAVYYCARLATWDWYFDVWGQGTTVTVSSASTKGPSVFPLAPSSKSTSGGTAALGCLVKDYFPEPVTVSWNSGALTSGVHTFPAVLQSSGLYSLSSVVTVPSSSLGTQTYICNVNHKPSNTKVDKKVEPKSCGS

SEQ ID NO: 32485 - protein, 121 aa, synthetic construct
  source 1..121: note = Description of Artificial Sequence: Synthetic polypeptide; note = VH of XENP022407
EVQLVESGGGLVQPGGSLRLSCAASGFTFDDAWMDWVRQAPGKGLEWVAEISTKANNHATYYAESVKGRFTISRDDSKSSVYLQMNSLRAEDTAVYYCARLATWDWYFDVWGQGTTVTVSS

SEQ ID NO: 32486 - protein, 5 aa, synthetic construct
  source 1..5: note = Description of Artificial Sequence: Synthetic peptide; note = XENP022407 vhCDR1
DAWMD

SEQ ID NO: 32487 - protein, 19 aa, synthetic construct
  source 1..19: note = Description of Artificial Sequence: Synthetic peptide; note = XENP022407 vhCDR2
EISTKANNHATYYAESVKG

SEQ ID NO: 32488 - protein, 10 aa, synthetic construct
  source 1..10: note = Description of Artificial Sequence: Synthetic peptide; note = XENP022407 vhCDR3
LATWDWYFDV

SEQ ID NO: 32489 - protein, 218 aa, synthetic construct; identical to SEQ ID NO: 22359
  source 1..218: note = Description of Artificial Sequence: Synthetic polypeptide; note = XENP022407 7G8_H3.53_L1.11_Fab Light Chain

SEQ ID NO: 32490 - protein, 111 aa, synthetic construct; identical to SEQ ID NO: 22360
  source 1..111: note = Description of Artificial Sequence: Synthetic polypeptide; note = VL of XENP022407

SEQ ID NO: 32491 - protein, 15 aa, synthetic construct
  source 1..15: note = Description of Artificial Sequence: Synthetic peptide; note = XENP022407 vlCDR1
RASQSVDYDGDSYMN

SEQ ID NO: 32492 - protein, 7 aa, synthetic construct
  source 1..7: note = Description of Artificial Sequence: Synthetic peptide; note = XENP022407 vlCDR2
AASELES

SEQ ID NO: 32493 - protein, 9 aa, synthetic construct
  source 1..9: note = Description of Artificial Sequence: Synthetic peptide; note = XENP022407 vlCDR3
QQSNEDPFT

SEQ ID NO: 32494 - protein, 226 aa, synthetic construct; identical to SEQ ID NO: 31734
  source 1..226: note = Description of Artificial Sequence: Synthetic polypeptide; note = XENP022408 7G8_H3.18_L1.16_Fab Heavy Chain

SEQ ID NO: 32495 - protein, 121 aa, synthetic construct; identical to SEQ ID NO: 22325
  source 1..121: note = Description of Artificial Sequence: Synthetic polypeptide; note = VH of XENP022408

SEQ ID NO: 32496 - protein, 5 aa, synthetic construct
  source 1..5: note = Description of Artificial Sequence: Synthetic peptide; note = XENP022408 vhCDR1
DAWMD

SEQ ID NO: 32497 - protein, 19 aa, synthetic construct
  source 1..19: note = Description of Artificial Sequence: Synthetic peptide; note = XENP022408 vhCDR2
EISTKANNHATYYAESVKG

SEQ ID NO: 32498 - protein, 10 aa, synthetic construct
  source 1..10: note = Description of Artificial Sequence: Synthetic peptide; note = XENP022408 vhCDR3
LATWDWYFDV

SEQ ID NO: 32499 - protein, 218 aa, synthetic construct
  source 1..218: note = Description of Artificial Sequence: Synthetic polypeptide; note = XENP022408 7G8_H3.18_L1.16_Fab Light Chain
DIVLTQSPSSLSASVGDRVTITCRASQSVDYDGDSYMNWYQQKPGKPPKLLIYAASELESGIPARLSGSGSGTDFTLTISSLQPEDFATYYCQQSNEDPFTFGSGTKLEIKRTVAAPSVFIFPPSDEQLKSGTASVVCLLNNFYPREAKVQWKVDNALQSGNSQESVTEQDSKDSTYSLSSTLTLSKADYEKHKVYACEVTHQGLSSPVTKSFNRGEC

SEQ ID NO: 32500 - protein, 111 aa, synthetic construct
  source 1..111: note = Description of Artificial Sequence: Synthetic polypeptide; note = VL of XENP022408
DIVLTQSPSSLSASVGDRVTITCRASQSVDYDGDSYMNWYQQKPGKPPKLLIYAASELESGIPARLSGSGSGTDFTLTISSLQPEDFATYYCQQSNEDPFTFGSGTKLEIK

SEQ ID NO: 32501 - protein, 15 aa, synthetic construct
  source 1..15: note = Description of Artificial Sequence: Synthetic peptide; note = XENP022408 vlCDR1
RASQSVDYDGDSYMN

SEQ ID NO: 32502 - protein, 7 aa, synthetic construct
  source 1..7: note = Description of Artificial Sequence: Synthetic peptide; note = XENP022408 vlCDR2
AASELES

SEQ ID NO: 32503 - protein, 9 aa, synthetic construct
  source 1..9: note = Description of Artificial Sequence: Synthetic peptide; note = XENP022408 vlCDR3
QQSNEDPFT

SEQ ID NO: 32504 - protein, 226 aa, synthetic construct; identical to SEQ ID NO: 31734
  source 1..226: note = Description of Artificial Sequence: Synthetic polypeptide; note = XENP022409 7G8_H3.18_L1.17_Fab Heavy Chain

SEQ ID NO: 32505 - protein, 121 aa, synthetic construct; identical to SEQ ID NO: 22325
  source 1..121: note = Description of Artificial Sequence: Synthetic polypeptide; note = VH of XENP022409

SEQ ID NO: 32506 - protein, 5 aa, synthetic construct
  source 1..5: note = Description of Artificial Sequence: Synthetic peptide; note = XENP022409 vhCDR1
DAWMD

SEQ ID NO: 32507 - protein, 19 aa, synthetic construct
  source 1..19: note = Description of Artificial Sequence: Synthetic peptide; note = XENP022409 vhCDR2
EISTKANNHATYYAESVKG

SEQ ID NO: 32508 - protein, 10 aa, synthetic construct
  source 1..10: note = Description of Artificial Sequence: Synthetic peptide; note = XENP022409 vhCDR3
LATWDWYFDV

SEQ ID NO: 32509 - protein, 218 aa, synthetic construct
  source 1..218: note = Description of Artificial Sequence: Synthetic polypeptide; note = XENP022409 7G8_H3.18_L1.17_Fab Light Chain
DVVLTQSPSSLSASVGDRVTITCRASQSVDYDGDSYMNWYQQKPGKPPKLLIYAASELESGIPARLSGSGSGTDFTLTISSLQPEDFATYYCQQSNEDPFTFGSGTKLEIKRTVAAPSVFIFPPSDEQLKSGTASVVCLLNNFYPREAKVQWKVDNALQSGNSQESVTEQDSKDSTYSLSSTLTLSKADYEKHKVYACEVTHQGLSSPVTKSFNRGEC

SEQ ID NO: 32510 - protein, 111 aa, synthetic construct
  source 1..111: note = Description of Artificial Sequence: Synthetic polypeptide; note = VL of XENP022409
DVVLTQSPSSLSASVGDRVTITCRASQSVDYDGDSYMNWYQQKPGKPPKLLIYAASELESGIPARLSGSGSGTDFTLTISSLQPEDFATYYCQQSNEDPFTFGSGTKLEIK

SEQ ID NO: 32511 - protein, 15 aa, synthetic construct
  source 1..15: note = Description of Artificial Sequence: Synthetic peptide; note = XENP022409 vlCDR1
RASQSVDYDGDSYMN

SEQ ID NO: 32512 - protein, 7 aa, synthetic construct
  source 1..7: note = Description of Artificial Sequence: Synthetic peptide; note = XENP022409 vlCDR2
AASELES

SEQ ID NO: 32513 - protein, 9 aa, synthetic construct
  source 1..9: note = Description of Artificial Sequence: Synthetic peptide; note = XENP022409 vlCDR3
QQSNEDPFT

SEQ ID NO: 32514 - protein, 226 aa, synthetic construct; identical to SEQ ID NO: 31734
  source 1..226: note = Description of Artificial Sequence: Synthetic polypeptide; note = XENP022410 7G8_H3.18_L1.18_Fab Heavy Chain

SEQ ID NO: 32515 - protein, 121 aa, synthetic construct; identical to SEQ ID NO: 22325
  source 1..121: note = Description of Artificial Sequence: Synthetic polypeptide; note = VH of XENP022410

SEQ ID NO: 32516 - protein, 5 aa, synthetic construct
  source 1..5: note = Description of Artificial Sequence: Synthetic peptide; note = XENP022410 vhCDR1
DAWMD

SEQ ID NO: 32517 - protein, 19 aa, synthetic construct
  source 1..19: note = Description of Artificial Sequence: Synthetic peptide; note = XENP022410 vhCDR2
EISTKANNHATYYAESVKG

SEQ ID NO: 32518 - protein, 10 aa, synthetic construct
  source 1..10: note = Description of Artificial Sequence: Synthetic peptide; note = XENP022410 vhCDR3
LATWDWYFDV

SEQ ID NO: 32519 - protein, 218 aa, synthetic construct
  source 1..218: note = Description of Artificial Sequence: Synthetic polypeptide; note = XENP022410 7G8_H3.18_L1.18_Fab Light Chain
DTVMTQSPSSLSASVGDRVTITCRASQSVDYDGDSYMNWYQQKPGKPPKLLIYAASELESGIPARLSGSGSGTDFTLTISSLQPEDFATYYCQQSNEDPFTFGSGTKLEIKRTVAAPSVFIFPPSDEQLKSGTASVVCLLNNFYPREAKVQWKVDNALQSGNSQESVTEQDSKDSTYSLSSTLTLSKADYEKHKVYACEVTHQGLSSPVTKSFNRGEC

SEQ ID NO: 32520 - protein, 111 aa, synthetic construct
  source 1..111: note = Description of Artificial Sequence: Synthetic polypeptide; note = VL of XENP022410
DTVMTQSPSSLSASVGDRVTITCRASQSVDYDGDSYMNWYQQKPGKPPKLLIYAASELESGIPARLSGSGSGTDFTLTISSLQPEDFATYYCQQSNEDPFTFGSGTKLEIK

SEQ ID NO: 32521 - protein, 15 aa, synthetic construct
  source 1..15: note = Description of Artificial Sequence: Synthetic peptide; note = XENP022410 vlCDR1
RASQSVDYDGDSYMN

SEQ ID NO: 32522 - protein, 7 aa, synthetic construct
  source 1..7: note = Description of Artificial Sequence: Synthetic peptide; note = XENP022410 vlCDR2
AASELES

SEQ ID NO: 32523 - protein, 9 aa, synthetic construct
  source 1..9: note = Description of Artificial Sequence: Synthetic peptide; note = XENP022410 vlCDR3
QQSNEDPFT

SEQ ID NO: 32524 - protein, 226 aa, synthetic construct; identical to SEQ ID NO: 31734
  source 1..226: note = Description of Artificial Sequence: Synthetic polypeptide; note = XENP022411 7G8_H3.18_L1.19_Fab Heavy Chain

SEQ ID NO: 32525 - protein, 121 aa, synthetic construct; identical to SEQ ID NO: 22325
  source 1..121: note = Description of Artificial Sequence: Synthetic polypeptide; note = VH of XENP022411

SEQ ID NO: 32526 - protein, 5 aa, synthetic construct
  source 1..5: note = Description of Artificial Sequence: Synthetic peptide; note = XENP022411 vhCDR1
DAWMD

SEQ ID NO: 32527 - protein, 19 aa, synthetic construct
  source 1..19: note = Description of Artificial Sequence: Synthetic peptide; note = XENP022411 vhCDR2
EISTKANNHATYYAESVKG

SEQ ID NO: 32528 - protein, 10 aa, synthetic construct
  source 1..10: note = Description of Artificial Sequence: Synthetic peptide; note = XENP022411 vhCDR3
LATWDWYFDV

SEQ ID NO: 32529 - protein, 218 aa, synthetic construct
  source 1..218: note = Description of Artificial Sequence: Synthetic polypeptide; note = XENP022411 7G8_H3.18_L1.19_Fab Light Chain
DTVLTQSPSSLSASVGDRVTITCRASQSVDYDGDSYLNWYQQKPGKPPKLLIYAASELESGIPARLSGSGSGTDFTLTISSLQPEDFATYYCQQSNEDPFTFGSGTKLEIKRTVAAPSVFIFPPSDEQLKSGTASVVCLLNNFYPREAKVQWKVDNALQSGNSQESVTEQDSKDSTYSLSSTLTLSKADYEKHKVYACEVTHQGLSSPVTKSFNRGEC

SEQ ID NO: 32530 - protein, 111 aa, synthetic construct
  source 1..111: note = Description of Artificial Sequence: Synthetic polypeptide; note = VL of XENP022411
DTVLTQSPSSLSASVGDRVTITCRASQSVDYDGDSYLNWYQQKPGKPPKLLIYAASELESGIPARLSGSGSGTDFTLTISSLQPEDFATYYCQQSNEDPFTFGSGTKLEIK

SEQ ID NO: 32531 - protein, 15 aa, synthetic construct
  source 1..15: note = Description of Artificial Sequence: Synthetic peptide; note = XENP022411 vlCDR1
RASQSVDYDGDSYLN

SEQ ID NO: 32532 - protein, 7 aa, synthetic construct
  source 1..7: note = Description of Artificial Sequence: Synthetic peptide; note = XENP022411 vlCDR2
AASELES

SEQ ID NO: 32533 - protein, 9 aa, synthetic construct
  source 1..9: note = Description of Artificial Sequence: Synthetic peptide; note = XENP022411 vlCDR3
QQSNEDPFT

SEQ ID NO: 32534 - protein, 226 aa, synthetic construct; identical to SEQ ID NO: 31734
  source 1..226: note = Description of Artificial Sequence: Synthetic polypeptide; note = XENP022412 7G8_H3.18_L1.20_Fab Heavy Chain

SEQ ID NO: 32535 - protein, 121 aa, synthetic construct; identical to SEQ ID NO: 22325
  source 1..121: note = Description of Artificial Sequence: Synthetic polypeptide; note = VH of XENP022412

SEQ ID NO: 32536 - protein, 5 aa, synthetic construct
  source 1..5: note = Description of Artificial Sequence: Synthetic peptide; note = XENP022412 vhCDR1
DAWMD

SEQ ID NO: 32537 - protein, 19 aa, synthetic construct
  source 1..19: note = Description of Artificial Sequence: Synthetic peptide; note = XENP022412 vhCDR2
EISTKANNHATYYAESVKG

SEQ ID NO: 32538 - protein, 10 aa, synthetic construct
  source 1..10: note = Description of Artificial Sequence: Synthetic peptide; note = XENP022412 vhCDR3
LATWDWYFDV

SEQ ID NO: 32539 - protein, 218 aa, synthetic construct
  source 1..218: note = Description of Artificial Sequence: Synthetic polypeptide; note = XENP022412 7G8_H3.18_L1.20_Fab Light Chain
DTVLTQSPSSLSASVGDRVTITCRASQSVDYDGDSYMNWYQQKPGQPPKLLIYAASELESGIPARLSGSGSGTDFTLTISSLQPEDFATYYCQQSNEDPFTFGSGTKLEIKRTVAAPSVFIFPPSDEQLKSGTASVVCLLNNFYPREAKVQWKVDNALQSGNSQESVTEQDSKDSTYSLSSTLTLSKADYEKHKVYACEVTHQGLSSPVTKSFNRGEC

SEQ ID NO: 32540 - protein, 111 aa, synthetic construct
  source 1..111: note = Description of Artificial Sequence: Synthetic polypeptide; note = VL of XENP022412
DTVLTQSPSSLSASVGDRVTITCRASQSVDYDGDSYMNWYQQKPGQPPKLLIYAASELESGIPARLSGSGSGTDFTLTISSLQPEDFATYYCQQSNEDPFTFGSGTKLEIK

SEQ ID NO: 32541 - protein, 15 aa, synthetic construct
  source 1..15: note = Description of Artificial Sequence: Synthetic peptide; note = XENP022412 vlCDR1
RASQSVDYDGDSYMN

SEQ ID NO: 32542 - protein, 7 aa, synthetic construct
  source 1..7: note = Description of Artificial Sequence: Synthetic peptide; note = XENP022412 vlCDR2
AASELES

SEQ ID NO: 32543 - protein, 9 aa, synthetic construct
  source 1..9: note = Description of Artificial Sequence: Synthetic peptide; note = XENP022412 vlCDR3
QQSNEDPFT

SEQ ID NO: 32544 - protein, 226 aa, synthetic construct; identical to SEQ ID NO: 31734
  source 1..226: note = Description of Artificial Sequence: Synthetic polypeptide; note = XENP022413 7G8_H3.18_L1.21_Fab Heavy Chain

SEQ ID NO: 32545 - protein, 121 aa, synthetic construct; identical to SEQ ID NO: 22325
  source 1..121: note = Description of Artificial Sequence: Synthetic polypeptide; note = VH of XENP022413

SEQ ID NO: 32546 - protein, 5 aa, synthetic construct
  source 1..5: note = Description of Artificial Sequence: Synthetic peptide; note = XENP022413 vhCDR1
DAWMD

SEQ ID NO: 32547 - protein, 19 aa, synthetic construct
  source 1..19: note = Description of Artificial Sequence: Synthetic peptide; note = XENP022413 vhCDR2
EISTKANNHATYYAESVKG

SEQ ID NO: 32548 - protein, 10 aa, synthetic construct
  source 1..10: note = Description of Artificial Sequence: Synthetic peptide; note = XENP022413 vhCDR3
LATWDWYFDV

SEQ ID NO: 32549 - protein, 218 aa, synthetic construct
  source 1..218: note = Description of Artificial Sequence: Synthetic polypeptide; note = XENP022413 7G8_H3.18_L1.21_Fab Light Chain
DTVLTQSPSSLSASVGDRVTITCRASQSVDYDGDSYMNWYQQKPGLPPKLLIYAASELESGIPARLSGSGSGTDFTLTISSLQPEDFATYYCQQSNEDPFTFGSGTKLEIKRTVAAPSVFIFPPSDEQLKSGTASVVCLLNNFYPREAKVQWKVDNALQSGNSQESVTEQDSKDSTYSLSSTLTLSKADYEKHKVYACEVTHQGLSSPVTKSFNRGEC

SEQ ID NO: 32550 - protein, 111 aa, synthetic construct
  source 1..111: note = Description of Artificial Sequence: Synthetic polypeptide; note = VL of XENP022413
DTVLTQSPSSLSASVGDRVTITCRASQSVDYDGDSYMNWYQQKPGLPPKLLIYAASELESGIPARLSGSGSGTDFTLTISSLQPEDFATYYCQQSNEDPFTFGSGTKLEIK

SEQ ID NO: 32551 - protein, 15 aa, synthetic construct
  source 1..15: note = Description of Artificial Sequence: Synthetic peptide; note = XENP022413 vlCDR1
RASQSVDYDGDSYMN

SEQ ID NO: 32552 - protein, 7 aa, synthetic construct
  source 1..7: note = Description of Artificial Sequence: Synthetic peptide; note = XENP022413 vlCDR2
AASELES

SEQ ID NO: 32553 - protein, 9 aa, synthetic construct
  source 1..9: note = Description of Artificial Sequence: Synthetic peptide; note = XENP022413 vlCDR3
QQSNEDPFT

SEQ ID NO: 32554 - protein, 226 aa, synthetic construct; identical to SEQ ID NO: 31734
  source 1..226: note = Description of Artificial Sequence: Synthetic polypeptide; note = XENP022414 7G8_H3.18_L1.22_Fab Heavy Chain

SEQ ID NO: 32555 - protein, 121 aa, synthetic construct; identical to SEQ ID NO: 22325
  source 1..121: note = Description of Artificial Sequence: Synthetic polypeptide; note = VH of XENP022414

SEQ ID NO: 32556 - protein, 5 aa, synthetic construct
  source 1..5: note = Description of Artificial Sequence: Synthetic peptide; note = XENP022414 vhCDR1
DAWMD

SEQ ID NO: 32557 - protein, 19 aa, synthetic construct
  source 1..19: note = Description of Artificial Sequence: Synthetic peptide; note = XENP022414 vhCDR2
EISTKANNHATYYAESVKG

SEQ ID NO: 32558 - protein, 10 aa, synthetic construct
  source 1..10: note = Description of Artificial Sequence: Synthetic peptide; note = XENP022414 vhCDR3
LATWDWYFDV

SEQ ID NO: 32559 - protein, 218 aa, synthetic construct
  source 1..218: note = Description of Artificial Sequence: Synthetic polypeptide; note = XENP022414 7G8_H3.18_L1.22_Fab Light Chain
DTVLTQSPSSLSASVGDRVTITCRASQSVDYDGDSYMNWYQQKPGEPPKLLIYAASELESGIPARLSGSGSGTDFTLTISSLQPEDFATYYCQQSNEDPFTFGSGTKLEIKRTVAAPSVFIFPPSDEQLKSGTASVVCLLNNFYPREAKVQWKVDNALQSGNSQESVTEQDSKDSTYSLSSTLTLSKADYEKHKVYACEVTHQGLSSPVTKSFNRGEC

SEQ ID NO: 32560 - protein, 111 aa, synthetic construct
  source 1..111: note = Description of Artificial Sequence: Synthetic polypeptide; note = VL of XENP022414
DTVLTQSPSSLSASVGDRVTITCRASQSVDYDGDSYMNWYQQKPGEPPKLLIYAASELESGIPARLSGSGSGTDFTLTISSLQPEDFATYYCQQSNEDPFTFGSGTKLEIK

SEQ ID NO: 32561 - protein, 15 aa, synthetic construct
  source 1..15: note = Description of Artificial Sequence: Synthetic peptide; note = XENP022414 vlCDR1
RASQSVDYDGDSYMN

SEQ ID NO: 32562 - protein, 7 aa, synthetic construct
  source 1..7: note = Description of Artificial Sequence: Synthetic peptide; note = XENP022414 vlCDR2
AASELES

SEQ ID NO: 32563 - protein, 9 aa, synthetic construct
  source 1..9: note = Description of Artificial Sequence: Synthetic peptide; note = XENP022414 vlCDR3
QQSNEDPFT

SEQ ID NO: 32564 - protein, 226 aa, synthetic construct; identical to SEQ ID NO: 31734
  source 1..226: note = Description of Artificial Sequence: Synthetic polypeptide; note = XENP022415 7G8_H3.18_L1.23_Fab Heavy Chain

SEQ ID NO: 32565 - protein, 121 aa, synthetic construct; identical to SEQ ID NO: 22325
  source 1..121: note = Description of Artificial Sequence: Synthetic polypeptide; note = VH of XENP022415

SEQ ID NO: 32566 - protein, 5 aa, synthetic construct
  source 1..5: note = Description of Artificial Sequence: Synthetic peptide; note = XENP022415 vhCDR1
DAWMD

SEQ ID NO: 32567 - protein, 19 aa, synthetic construct
  source 1..19: note = Description of Artificial Sequence: Synthetic peptide; note = XENP022415 vhCDR2
EISTKANNHATYYAESVKG

SEQ ID NO: 32568 - protein, 10 aa, synthetic construct
  source 1..10: note = Description of Artificial Sequence: Synthetic peptide; note = XENP022415 vhCDR3
LATWDWYFDV

SEQ ID NO: 32569 - protein, 218 aa, synthetic construct
  source 1..218: note = Description of Artificial Sequence: Synthetic polypeptide; note = XENP022415 7G8_H3.18_L1.23_Fab Light Chain
DTVLTQSPSSLSASVGDRVTITCRASQSVDYDGDSYMNWYQQKPGKVPKLLIYAASELESGIPARLSGSGSGTDFTLTISSLQPEDFATYYCQQSNEDPFTFGSGTKLEIKRTVAAPSVFIFPPSDEQLKSGTASVVCLLNNFYPREAKVQWKVDNALQSGNSQESVTEQDSKDSTYSLSSTLTLSKADYEKHKVYACEVTHQGLSSPVTKSFNRGEC

SEQ ID NO: 32570 - protein, 111 aa, synthetic construct
  source 1..111: note = Description of Artificial Sequence: Synthetic polypeptide; note = VL of XENP022415
DTVLTQSPSSLSASVGDRVTITCRASQSVDYDGDSYMNWYQQKPGKVPKLLIYAASELESGIPARLSGSGSGTDFTLTISSLQPEDFATYYCQQSNEDPFTFGSGTKLEIK

SEQ ID NO: 32571 - protein, 15 aa, synthetic construct
  source 1..15: note = Description of Artificial Sequence: Synthetic peptide; note = XENP022415 vlCDR1
RASQSVDYDGDSYMN

SEQ ID NO: 32572 - protein, 7 aa, synthetic construct
  source 1..7: note = Description of Artificial Sequence: Synthetic peptide; note = XENP022415 vlCDR2
AASELES

SEQ ID NO: 32573 - protein, 9 aa, synthetic construct
  source 1..9: note = Description of Artificial Sequence: Synthetic peptide; note = XENP022415 vlCDR3
QQSNEDPFT

SEQ ID NO: 32574 - protein, 226 aa, synthetic construct; identical to SEQ ID NO: 31734
  source 1..226: note = Description of Artificial Sequence: Synthetic polypeptide; note = XENP022416 7G8_H3.18_L1.24_Fab Heavy Chain

SEQ ID NO: 32575 - protein, 121 aa, synthetic construct; identical to SEQ ID NO: 22325
  source 1..121: note = Description of Artificial Sequence: Synthetic polypeptide; note = VH of XENP022416

SEQ ID NO: 32576 - protein, 5 aa, synthetic construct
  source 1..5: note = Description of Artificial Sequence: Synthetic peptide; note = XENP022416 vhCDR1
DAWMD

SEQ ID NO: 32577 - protein, 19 aa, synthetic construct
  source 1..19: note = Description of Artificial Sequence: Synthetic peptide; note = XENP022416 vhCDR2
EISTKANNHATYYAESVKG

SEQ ID NO: 32578 - protein, 10 aa, synthetic construct
  source 1..10: note = Description of Artificial Sequence: Synthetic peptide; note = XENP022416 vhCDR3
LATWDWYFDV

SEQ ID NO: 32579 - protein, 218 aa, synthetic construct
  source 1..218: note = Description of Artificial Sequence: Synthetic polypeptide; note = XENP022416 7G8_H3.18_L1.24_Fab Light Chain
DTVLTQSPSSLSASVGDRVTITCRASQSVDYDGDSYMNWYQQKPGKAPKLLIYAASELESGIPARLSGSGSGTDFTLTISSLQPEDFATYYCQQSNEDPFTFGSGTKLEIKRTVAAPSVFIFPPSDEQLKSGTASVVCLLNNFYPREAKVQWKVDNALQSGNSQESVTEQDSKDSTYSLSSTLTLSKADYEKHKVYACEVTHQGLSSPVTKSFNRGEC

SEQ ID NO: 32580 - protein, 111 aa, synthetic construct
  source 1..111: note = Description of Artificial Sequence: Synthetic polypeptide; note = VL of XENP022416
DTVLTQSPSSLSASVGDRVTITCRASQSVDYDGDSYMNWYQQKPGKAPKLLIYAASELESGIPARLSGSGSGTDFTLTISSLQPEDFATYYCQQSNEDPFTFGSGTKLEIK

SEQ ID NO: 32581 - protein, 15 aa, synthetic construct
  source 1..15: note = Description of Artificial Sequence: Synthetic peptide; note = XENP022416 vlCDR1
RASQSVDYDGDSYMN

SEQ ID NO: 32582 - protein, 7 aa, synthetic construct
  source 1..7: note = Description of Artificial Sequence: Synthetic peptide; note = XENP022416 vlCDR2
AASELES

SEQ ID NO: 32583 - protein, 9 aa, synthetic construct
  source 1..9: note = Description of Artificial Sequence: Synthetic peptide; note = XENP022416 vlCDR3
QQSNEDPFT

SEQ ID NO: 32584 - protein, 226 aa, synthetic construct; identical to SEQ ID NO: 31734
  source 1..226: note = Description of Artificial Sequence: Synthetic polypeptide; note = XENP022417 7G8_H3.18_L1.25_Fab Heavy Chain

SEQ ID NO: 32585 - protein, 121 aa, synthetic construct; identical to SEQ ID NO: 22325
  source 1..121: note = Description of Artificial Sequence: Synthetic polypeptide; note = VH of XENP022417

SEQ ID NO: 32586 - protein, 5 aa, synthetic construct
  source 1..5: note = Description of Artificial Sequence: Synthetic peptide; note = XENP022417 vhCDR1
DAWMD

SEQ ID NO: 32587 - protein, 19 aa, synthetic construct
  source 1..19: note = Description of Artificial Sequence: Synthetic peptide; note = XENP022417 vhCDR2
EISTKANNHATYYAESVKG

SEQ ID NO: 32588 - protein, 10 aa, synthetic construct
  source 1..10: note = Description of Artificial Sequence: Synthetic peptide; note = XENP022417 vhCDR3
LATWDWYFDV

SEQ ID NO: 32589 - protein, 218 aa, synthetic construct
  source 1..218: note = Description of Artificial Sequence: Synthetic polypeptide; note = XENP022417 7G8_H3.18_L1.25_Fab Light Chain
DTVLTQSPSSLSASVGDRVTITCRASQSVDYDGDSYMNWYQQKPGKSPKLLIYAASELESGIPARLSGSGSGTDFTLTISSLQPEDFATYYCQQSNEDPFTFGSGTKLEIKRTVAAPSVFIFPPSDEQLKSGTASVVCLLNNFYPREAKVQWKVDNALQSGNSQESVTEQDSKDSTYSLSSTLTLSKADYEKHKVYACEVTHQGLSSPVTKSFNRGEC

SEQ ID NO: 32590 - protein, 111 aa, synthetic construct
  source 1..111: note = Description of Artificial Sequence: Synthetic polypeptide; note = VL of XENP022417
DTVLTQSPSSLSASVGDRVTITCRASQSVDYDGDSYMNWYQQKPGKSPKLLIYAASELESGIPARLSGSGSGTDFTLTISSLQPEDFATYYCQQSNEDPFTFGSGTKLEIK

SEQ ID NO: 32591 - protein, 15 aa, synthetic construct
  source 1..15: note = Description of Artificial Sequence: Synthetic peptide; note = XENP022417 vlCDR1
RASQSVDYDGDSYMN

SEQ ID NO: 32592 - protein, 7 aa, synthetic construct
  source 1..7: note = Description of Artificial Sequence: Synthetic peptide; note = XENP022417 vlCDR2
AASELES

SEQ ID NO: 32593 - protein, 9 aa, synthetic construct
  source 1..9: note = Description of Artificial Sequence: Synthetic peptide; note = XENP022417 vlCDR3
QQSNEDPFT

SEQ ID NO: 32594 - protein, 226 aa, synthetic construct; identical to SEQ ID NO: 31734
  source 1..226: note = Description of Artificial Sequence: Synthetic polypeptide; note = XENP022418 7G8_H3.18_L1.26_Fab Heavy Chain

SEQ ID NO: 32595 - protein, 121 aa, synthetic construct; identical to SEQ ID NO: 22325
  source 1..121: note = Description of Artificial Sequence: Synthetic polypeptide; note = VH of XENP022418

SEQ ID NO: 32596 - protein, 5 aa, synthetic construct
  source 1..5: note = Description of Artificial Sequence: Synthetic peptide; note = XENP022418 vhCDR1
DAWMD

SEQ ID NO: 32597 - protein, 19 aa, synthetic construct
  source 1..19: note = Description of Artificial Sequence: Synthetic peptide; note = XENP022418 vhCDR2
EISTKANNHATYYAESVKG

SEQ ID NO: 32598 - protein, 10 aa, synthetic construct
  source 1..10: note = Description of Artificial Sequence: Synthetic peptide; note = XENP022418 vhCDR3
LATWDWYFDV

SEQ ID NO: 32599 - protein, 218 aa, synthetic construct
  source 1..218: note = Description of Artificial Sequence: Synthetic polypeptide; note = XENP022418 7G8_H3.18_L1.26_Fab Light Chain
DTVLTQSPSSLSASVGDRVTITCRASQSVDYDGDSYMNWYQQKPGKPPKLLIYAASELESGVPARLSGSGSGTDFTLTISSLQPEDFATYYCQQSNEDPFTFGSGTKLEIKRTVAAPSVFIFPPSDEQLKSGTASVVCLLNNFYPREAKVQWKVDNALQSGNSQESVTEQDSKDSTYSLSSTLTLSKADYEKHKVYACEVTHQGLSSPVTKSFNRGEC

SEQ ID NO: 32600 - protein, 111 aa, synthetic construct
  source 1..111: note = Description of Artificial Sequence: Synthetic polypeptide; note = VL of XENP022418
DTVLTQSPSSLSASVGDRVTITCRASQSVDYDGDSYMNWYQQKPGKPPKLLIYAASELESGVPARLSGSGSGTDFTLTISSLQPEDFATYYCQQSNEDPFTFGSGTKLEIK

SEQ ID NO: 32601 - protein, 15 aa, synthetic construct
  source 1..15: note = Description of Artificial Sequence: Synthetic peptide; note = XENP022418 vlCDR1
RASQSVDYDGDSYMN

SEQ ID NO: 32602 - protein, 7 aa, synthetic construct
  source 1..7: note = Description of Artificial Sequence: Synthetic peptide; note = XENP022418 vlCDR2
AASELES

SEQ ID NO: 32603 - protein, 9 aa, synthetic construct
  source 1..9: note = Description of Artificial Sequence: Synthetic peptide; note = XENP022418 vlCDR3
QQSNEDPFT

SEQ ID NO: 32604 - protein, 226 aa, synthetic construct; identical to SEQ ID NO: 31734
  source 1..226: note = Description of Artificial Sequence: Synthetic polypeptide; note = XENP022419 7G8_H3.18_L1.27_Fab Heavy Chain

SEQ ID NO: 32605 - protein, 121 aa, synthetic construct; identical to SEQ ID NO: 22325
  source 1..121: note = Description of Artificial Sequence: Synthetic polypeptide; note = VH of XENP022419

SEQ ID NO: 32606 - protein, 5 aa, synthetic construct
  source 1..5: note = Description of Artificial Sequence: Synthetic peptide; note = XENP022419 vhCDR1
DAWMD

SEQ ID NO: 32607 - protein, 19 aa, synthetic construct
  source 1..19: note = Description of Artificial Sequence: Synthetic peptide; note = XENP022419 vhCDR2
EISTKANNHATYYAESVKG

SEQ ID NO: 32608 - protein, 10 aa, synthetic construct
  source 1..10: note = Description of Artificial Sequence: Synthetic peptide; note = XENP022419 vhCDR3
LATWDWYFDV

SEQ ID NO: 32609 - protein, 218 aa, synthetic construct
  source 1..218: note = Description of Artificial Sequence: Synthetic polypeptide; note = XENP022419 7G8_H3.18_L1.27_Fab Light Chain
DTVLTQSPSSLSASVGDRVTITCRASQSVDYDGDSYMNWYQQKPGKPPKLLIYAASELESGIPSRLSGSGSGTDFTLTISSLQPEDFATYYCQQSNEDPFTFGSGTKLEIKRTVAAPSVFIFPPSDEQLKSGTASVVCLLNNFYPREAKVQWKVDNALQSGNSQESVTEQDSKDSTYSLSSTLTLSKADYEKHKVYACEVTHQGLSSPVTKSFNRGEC

SEQ ID NO: 32610 - protein, 111 aa, synthetic construct
  source 1..111: note = Description of Artificial Sequence: Synthetic polypeptide; note = VL of XENP022419
DTVLTQSPSSLSASVGDRVTITCRASQSVDYDGDSYMNWYQQKPGKPPKLLIYAASELESGIPSRLSGSGSGTDFTLTISSLQPEDFATYYCQQSNEDPFTFGSGTKLEIK

SEQ ID NO: 32611 - protein, 15 aa, synthetic construct
  source 1..15: note = Description of Artificial Sequence: Synthetic peptide; note = XENP022419 vlCDR1
RASQSVDYDGDSYMN

SEQ ID NO: 32612 - protein, 7 aa, synthetic construct
  source 1..7: note = Description of Artificial Sequence: Synthetic peptide; note = XENP022419 vlCDR2
AASELES

SEQ ID NO: 32613 - protein, 9 aa, synthetic construct
  source 1..9: note = Description of Artificial Sequence: Synthetic peptide; note = XENP022419 vlCDR3
QQSNEDPFT

SEQ ID NO: 32614 - protein, 226 aa, synthetic construct; identical to SEQ ID NO: 31734
  source 1..226: note = Description of Artificial Sequence: Synthetic polypeptide; note = XENP022420 7G8_H3.18_L1.28_Fab Heavy Chain

SEQ ID NO: 32615 - protein, 121 aa, synthetic construct; identical to SEQ ID NO: 22325
  source 1..121: note = Description of Artificial Sequence: Synthetic polypeptide; note = VH of XENP022420

SEQ ID NO: 32616 - protein, 5 aa, synthetic construct
  source 1..5: note = Description of Artificial Sequence: Synthetic peptide; note = XENP022420 vhCDR1
DAWMD

SEQ ID NO: 32617 - protein, 19 aa, synthetic construct
  source 1..19: note = Description of Artificial Sequence: Synthetic peptide; note = XENP022420 vhCDR2
EISTKANNHATYYAESVKG

SEQ ID NO: 32618 - protein, 10 aa, synthetic construct
  source 1..10: note = Description of Artificial Sequence: Synthetic peptide; note = XENP022420 vhCDR3
LATWDWYFDV

SEQ ID NO: 32619 - protein, 218 aa, synthetic construct
  source 1..218: note = Description of Artificial Sequence: Synthetic polypeptide; note = XENP022420 7G8_H3.18_L1.28_Fab Light Chain
DTVLTQSPSSLSASVGDRVTITCRASQSVDYDGDSYMNWYQQKPGKPPKLLIYAASELESGIPDRLSGSGSGTDFTLTISSLQPEDFATYYCQQSNEDPFTFGSGTKLEIKRTVAAPSVFIFPPSDEQLKSGTASVVCLLNNFYPREAKVQWKVDNALQSGNSQESVTEQDSKDSTYSLSSTLTLSKADYEKHKVYACEVTHQGLSSPVTKSFNRGEC

SEQ ID NO: 32620 - protein, 111 aa, synthetic construct
  source 1..111: note = Description of Artificial Sequence: Synthetic polypeptide; note = VL of XENP022420
DTVLTQSPSSLSASVGDRVTITCRASQSVDYDGDSYMNWYQQKPGKPPKLLIYAASELESGIPDRLSGSGSGTDFTLTISSLQPEDFATYYCQQSNEDPFTFGSGTKLEIK

SEQ ID NO: 32621 - protein, 15 aa, synthetic construct
  source 1..15: note = Description of Artificial Sequence: Synthetic peptide; note = XENP022420 vlCDR1
RASQSVDYDGDSYMN

SEQ ID NO: 32622 - protein, 7 aa, synthetic construct
  source 1..7: note = Description of Artificial Sequence: Synthetic peptide; note = XENP022420 vlCDR2
AASELES

SEQ ID NO: 32623 - protein, 9 aa, synthetic construct
  source 1..9: note = Description of Artificial Sequence: Synthetic peptide; note = XENP022420 vlCDR3
QQSNEDPFT

SEQ ID NO: 32624 - protein, 226 aa, synthetic construct; identical to SEQ ID NO: 31734
  source 1..226: note = Description of Artificial Sequence: Synthetic polypeptide; note = XENP022421 7G8_H3.18_L1.29_Fab Heavy Chain

SEQ ID NO: 32625 - protein, 121 aa, synthetic construct; identical to SEQ ID NO: 22325
  source 1..121: note = Description of Artificial Sequence: Synthetic polypeptide; note = VH of XENP022421

SEQ ID NO: 32626 - protein, 5 aa, synthetic construct
  source 1..5: note = Description of Artificial Sequence: Synthetic peptide; note = XENP022421 vhCDR1
DAWMD

SEQ ID NO: 32627 - protein, 19 aa, synthetic construct
  source 1..19: note = Description of Artificial Sequence: Synthetic peptide; note = XENP022421 vhCDR2
EISTKANNHATYYAESVKG

SEQ ID NO: 32628 - protein, 10 aa, synthetic construct
  source 1..10: note = Description of Artificial Sequence: Synthetic peptide; note = XENP022421 vhCDR3
LATWDWYFDV

SEQ ID NO: 32629 - protein, 218 aa, synthetic construct
  source 1..218: note = Description of Artificial Sequence: Synthetic polypeptide; note = XENP022421 7G8_H3.18_L1.29_Fab Light Chain
DTVLTQSPSSLSASVGDRVTITCRASQSVDYDGDSYMNWYQQKPGKPPKLLIYAASELESGIPPRLSGSGSGTDFTLTISSLQPEDFATYYCQQSNEDPFTFGSGTKLEIKRTVAAPSVFIFPPSDEQLKSGTASVVCLLNNFYPREAKVQWKVDNALQSGNSQESVTEQDSKDSTYSLSSTLTLSKADYEKHKVYACEVTHQGLSSPVTKSFNRGEC

SEQ ID NO: 32630 - protein, 111 aa, synthetic construct
  source 1..111: note = Description of Artificial Sequence: Synthetic polypeptide; note = VL of XENP022421
DTVLTQSPSSLSASVGDRVTITCRASQSVDYDGDSYMNWYQQKPGKPPKLLIYAASELESGIPPRLSGSGSGTDFTLTISSLQPEDFATYYCQQSNEDPFTFGSGTKLEIK

SEQ ID NO: 32631 - protein, 15 aa, synthetic construct
  source 1..15: note = Description of Artificial Sequence: Synthetic peptide; note = XENP022421 vlCDR1
RASQSVDYDGDSYMN

SEQ ID NO: 32632 - protein, 7 aa, synthetic construct
  source 1..7: note = Description of Artificial Sequence: Synthetic peptide; note = XENP022421 vlCDR2
AASELES

SEQ ID NO: 32633 - protein, 9 aa, synthetic construct
  source 1..9: note = Description of Artificial Sequence: Synthetic peptide; note = XENP022421 vlCDR3
QQSNEDPFT

SEQ ID NO: 32634 - protein, 226 aa, synthetic construct; identical to SEQ ID NO: 31734
  source 1..226: note = Description of Artificial Sequence: Synthetic polypeptide; note = XENP022422 7G8_H3.18_L1.30_Fab Heavy Chain

SEQ ID NO: 32635 - protein, 121 aa, synthetic construct; identical to SEQ ID NO: 22325
  source 1..121: note = Description of Artificial Sequence: Synthetic polypeptide; note = VH of XENP022422

SEQ ID NO: 32636 - protein, 5 aa, synthetic construct
  source 1..5: note = Description of Artificial Sequence: Synthetic peptide; note = XENP022422 vhCDR1
DAWMD

SEQ ID NO: 32637 - protein, 19 aa, synthetic construct
  source 1..19: note = Description of Artificial Sequence: Synthetic peptide; note = XENP022422 vhCDR2
EISTKANNHATYYAESVKG

SEQ ID NO: 32638 - protein, 10 aa, synthetic construct
  source 1..10: note = Description of Artificial Sequence: Synthetic peptide; note = XENP022422 vhCDR3
LATWDWYFDV

SEQ ID NO: 32639 - protein, 218 aa, synthetic construct; identical to SEQ ID NO: 22539
  source 1..218: note = Description of Artificial Sequence: Synthetic polypeptide; note = XENP022422 7G8_H3.18_L1.30_Fab Light Chain

SEQ ID NO: 32640 - protein, 111 aa, synthetic construct; identical to SEQ ID NO: 22540
  source 1..111: note = Description of Artificial Sequence: Synthetic polypeptide; note = VL of XENP022422

SEQ ID NO: 32641 - protein, 15 aa, synthetic construct
  source 1..15: note = Description of Artificial Sequence: Synthetic peptide; note = XENP022422 vlCDR1
RASQSVDYDGDSYMN

SEQ ID NO: 32642 - protein, 7 aa, synthetic construct
  source 1..7: note = Description of Artificial Sequence: Synthetic peptide; note = XENP022422 vlCDR2
AASELES

SEQ ID NO: 32643 - protein, 9 aa, synthetic construct
  source 1..9: note = Description of Artificial Sequence: Synthetic peptide; note = XENP022422 vlCDR3
QQSNEDPFT

SEQ ID NO: 32644 - protein, 226 aa, synthetic construct; identical to SEQ ID NO: 31734
  source 1..226: note = Description of Artificial Sequence: Synthetic polypeptide; note = XENP022423 7G8_H3.18_L1.31_Fab Heavy Chain

SEQ ID NO: 32645 - protein, 121 aa, synthetic construct; identical to SEQ ID NO: 22325
  source 1..121: note = Description of Artificial Sequence: Synthetic polypeptide; note = VH of XENP022423

SEQ ID NO: 32646 - protein, 5 aa, synthetic construct
  source 1..5: note = Description of Artificial Sequence: Synthetic peptide; note = XENP022423 vhCDR1
DAWMD

SEQ ID NO: 32647 - protein, 19 aa, synthetic construct
  source 1..19: note = Description of Artificial Sequence: Synthetic peptide; note = XENP022423 vhCDR2
EISTKANNHATYYAESVKG

SEQ ID NO: 32648 - protein, 10 aa, synthetic construct
  source 1..10: note = Description of Artificial Sequence: Synthetic peptide; note = XENP022423 vhCDR3
LATWDWYFDV

SEQ ID NO: 32649 - protein, 218 aa, synthetic construct
  source 1..218: note = Description of Artificial Sequence: Synthetic polypeptide; note = XENP022423 7G8_H3.18_L1.31_Fab Light Chain
DTVLTQSPSSLSASVGDRVTITCRASQSVDYDGDSYMNWYQQKPGKPPKLLIYAASELESGIPARLSGSGSGTDFTLTISSLQPEDFATYYCQQSNEDPFTFGQGTKLEIKRTVAAPSVFIFPPSDEQLKSGTASVVCLLNNFYPREAKVQWKVDNALQSGNSQESVTEQDSKDSTYSLSSTLTLSKADYEKHKVYACEVTHQGLSSPVTKSFNRGEC

SEQ ID NO: 32650 - protein, 111 aa, synthetic construct
  source 1..111: note = Description of Artificial Sequence: Synthetic polypeptide; note = VL of XENP022423
DTVLTQSPSSLSASVGDRVTITCRASQSVDYDGDSYMNWYQQKPGKPPKLLIYAASELESGIPARLSGSGSGTDFTLTISSLQPEDFATYYCQQSNEDPFTFGQGTKLEIK

SEQ ID NO: 32651 - protein, 15 aa, synthetic construct
  source 1..15: note = Description of Artificial Sequence: Synthetic peptide; note = XENP022423 vlCDR1
RASQSVDYDGDSYMN

SEQ ID NO: 32652 - protein, 7 aa, synthetic construct
  source 1..7: note = Description of Artificial Sequence: Synthetic peptide; note = XENP022423 vlCDR2
AASELES

SEQ ID NO: 32653 - protein, 9 aa, synthetic construct
  source 1..9: note = Description of Artificial Sequence: Synthetic peptide; note = XENP022423 vlCDR3
QQSNEDPFT

SEQ ID NO: 32654 - protein, 226 aa, synthetic construct; identical to SEQ ID NO: 31734
  source 1..226: note = Description of Artificial Sequence: Synthetic polypeptide; note = XENP022424 7G8_H3.18_L1.32_Fab Heavy Chain

SEQ ID NO: 32655 - protein, 121 aa, synthetic construct; identical to SEQ ID NO: 22325
  source 1..121: note = Description of Artificial Sequence: Synthetic polypeptide; note = VH of XENP022424

SEQ ID NO: 32656 - protein, 5 aa, synthetic construct
  source 1..5: note = Description of Artificial Sequence: Synthetic peptide; note = XENP022424 vhCDR1
DAWMD

SEQ ID NO: 32657 - protein, 19 aa, synthetic construct
  source 1..19: note = Description of Artificial Sequence: Synthetic peptide; note = XENP022424 vhCDR2
EISTKANNHATYYAESVKG

SEQ ID NO: 32658 - protein, 10 aa, synthetic construct
  source 1..10: note = Description of Artificial Sequence: Synthetic peptide; note = XENP022424 vhCDR3
LATWDWYFDV

SEQ ID NO: 32659 - protein, 218 aa, synthetic construct
  source 1..218: note = Description of Artificial Sequence: Synthetic polypeptide; note = XENP022424 7G8_H3.18_L1.32_Fab Light Chain
DTVLTQSPSSLSASVGDRVTITCRASQSVDYDGDSYMNWYQQKPGKPPKLLIYAASELESGIPARLSGSGSGTDFTLTISSLQPEDFATYYCQQSNEDPFTFGPGTKLEIKRTVAAPSVFIFPPSDEQLKSGTASVVCLLNNFYPREAKVQWKVDNALQSGNSQESVTEQDSKDSTYSLSSTLTLSKADYEKHKVYACEVTHQGLSSPVTKSFNRGEC

SEQ ID NO: 32660 - protein, 111 aa, synthetic construct
  source 1..111: note = Description of Artificial Sequence: Synthetic polypeptide; note = VL of XENP022424
DTVLTQSPSSLSASVGDRVTITCRASQSVDYDGDSYMNWYQQKPGKPPKLLIYAASELESGIPARLSGSGSGTDFTLTISSLQPEDFATYYCQQSNEDPFTFGPGTKLEIK

SEQ ID NO: 32661 - protein, 15 aa, synthetic construct
  source 1..15: note = Description of Artificial Sequence: Synthetic peptide; note = XENP022424 vlCDR1
RASQSVDYDGDSYMN

SEQ ID NO: 32662 - protein, 7 aa, synthetic construct
  source 1..7: note = Description of Artificial Sequence: Synthetic peptide; note = XENP022424 vlCDR2
AASELES

SEQ ID NO: 32663 - protein, 9 aa, synthetic construct
  source 1..9: note = Description of Artificial Sequence: Synthetic peptide; note = XENP022424 vlCDR3
QQSNEDPFT

SEQ ID NO: 32664 - protein, 226 aa, synthetic construct; identical to SEQ ID NO: 31734
  source 1..226: note = Description of Artificial Sequence: Synthetic polypeptide; note = XENP022425 7G8_H3.18_L1.33_Fab Heavy Chain

SEQ ID NO: 32665 - protein, 121 aa, synthetic construct; identical to SEQ ID NO: 22325
  source 1..121: note = Description of Artificial Sequence: Synthetic polypeptide; note = VH of XENP022425

SEQ ID NO: 32666 - protein, 5 aa, synthetic construct
  source 1..5: note = Description of Artificial Sequence: Synthetic peptide; note = XENP022425 vhCDR1
DAWMD

SEQ ID NO: 32667 - protein, 19 aa, synthetic construct
  source 1..19: note = Description of Artificial Sequence: Synthetic peptide; note = XENP022425 vhCDR2
EISTKANNHATYYAESVKG

SEQ ID NO: 32668 - protein, 10 aa, synthetic construct
  source 1..10: note = Description of Artificial Sequence: Synthetic peptide; note = XENP022425 vhCDR3
LATWDWYFDV

SEQ ID NO: 32669 - protein, 218 aa, synthetic construct
  source 1..218: note = Description of Artificial Sequence: Synthetic polypeptide; note = XENP022425 7G8_H3.18_L1.33_Fab Light Chain
DTVLTQSPSSLSASVGDRVTITCRASQSVDYDGDSYMNWYQQKPGKPPKLLIYAASELESGIPARLSGSGSGTDFTLTISSLQPEDFATYYCQQSNEDPFTFGGGTKLEIKRTVAAPSVFIFPPSDEQLKSGTASVVCLLNNFYPREAKVQWKVDNALQSGNSQESVTEQDSKDSTYSLSSTLTLSKADYEKHKVYACEVTHQGLSSPVTKSFNRGEC

SEQ ID NO: 32670 - protein, 111 aa, synthetic construct
  source 1..111: note = Description of Artificial Sequence: Synthetic polypeptide; note = VL of XENP022425
DTVLTQSPSSLSASVGDRVTITCRASQSVDYDGDSYMNWYQQKPGKPPKLLIYAASELESGIPARLSGSGSGTDFTLTISSLQPEDFATYYCQQSNEDPFTFGGGTKLEIK

SEQ ID NO: 32671 - protein, 15 aa, synthetic construct
  source 1..15: note = Description of Artificial Sequence: Synthetic peptide; note = XENP022425 vlCDR1
RASQSVDYDGDSYMN

SEQ ID NO: 32672 - protein, 7 aa, synthetic construct
  source 1..7: note = Description of Artificial Sequence: Synthetic peptide; note = XENP022425 vlCDR2
AASELES

SEQ ID NO: 32673 - protein, 9 aa, synthetic construct
  source 1..9: note = Description of Artificial Sequence: Synthetic peptide; note = XENP022425 vlCDR3
QQSNEDPFT

SEQ ID NO: 32674 - protein, 226 aa, synthetic construct; identical to SEQ ID NO: 32254
  source 1..226: note = Description of Artificial Sequence: Synthetic polypeptide; note = XENP022582 7G8_H3.30_L1.30_Fab Heavy Chain

SEQ ID NO: 32675 - protein, 121 aa, synthetic construct; identical to SEQ ID NO: 22485
  source 1..121: note = Description of Artificial Sequence: Synthetic polypeptide; note = VH of XENP022582

SEQ ID NO: 32676 - protein, 5 aa, synthetic construct
  source 1..5: note = Description of Artificial Sequence: Synthetic peptide; note = XENP022582 vhCDR1
DAWMS

SEQ ID NO: 32677 - protein, 19 aa, synthetic construct
  source 1..19: note = Description of Artificial Sequence: Synthetic peptide; note = XENP022582 vhCDR2
EISTKANNHATYYAESVKG

SEQ ID NO: 32678 - protein, 10 aa, synthetic construct
  source 1..10: note = Description of Artificial Sequence: Synthetic peptide; note = XENP022582 vhCDR3
LATWDWYFDV

SEQ ID NO: 32679 - protein, 218 aa, synthetic construct; identical to SEQ ID NO: 22539
  source 1..218: note = Description of Artificial Sequence: Synthetic polypeptide; note = XENP022582 7G8_H3.30_L1.30_Fab Light Chain

SEQ ID NO: 32680 - protein, 111 aa, synthetic construct; identical to SEQ ID NO: 22540
  source 1..111: note = Description of Artificial Sequence: Synthetic polypeptide; note = VL of XENP022582

SEQ ID NO: 32681 - protein, 15 aa, synthetic construct
  source 1..15: note = Description of Artificial Sequence: Synthetic peptide; note = XENP022582 vlCDR1
RASQSVDYDGDSYMN

SEQ ID NO: 32682 - protein, 7 aa, synthetic construct
  source 1..7: note = Description of Artificial Sequence: Synthetic peptide; note = XENP022582 vlCDR2
AASELES

SEQ ID NO: 32683 - protein, 9 aa, synthetic construct
  source 1..9: note = Description of Artificial Sequence: Synthetic peptide; note = XENP022582 vlCDR3
QQSNEDPFT

SEQ ID NO: 32684 - protein, 226 aa, synthetic construct; identical to SEQ ID NO: 32284
  source 1..226: note = Description of Artificial Sequence: Synthetic polypeptide; note = XENP022583 7G8_H3.33_L1.30_Fab Heavy Chain

SEQ ID NO: 32685 - protein, 121 aa, synthetic construct; identical to SEQ ID NO: 22505
  source 1..121: note = Description of Artificial Sequence: Synthetic polypeptide; note = VH of XENP022583

SEQ ID NO: 32686 - protein, 5 aa, synthetic construct
  source 1..5: note = Description of Artificial Sequence: Synthetic peptide; note = XENP022583 vhCDR1
DAWMG

SEQ ID NO: 32687 - protein, 19 aa, synthetic construct
  source 1..19: note = Description of Artificial Sequence: Synthetic peptide; note = XENP022583 vhCDR2
EISTKANNHATYYAESVKG

SEQ ID NO: 32688 - protein, 10 aa, synthetic construct
  source 1..10: note = Description of Artificial Sequence: Synthetic peptide; note = XENP022583 vhCDR3
LATWDWYFDV

SEQ ID NO: 32689 - protein, 218 aa, synthetic construct; identical to SEQ ID NO: 22539
  source 1..218: note = Description of Artificial Sequence: Synthetic polypeptide; note = XENP022583 7G8_H3.33_L1.30_Fab Light Chain

SEQ ID NO: 32690 - protein, 111 aa, synthetic construct; identical to SEQ ID NO: 22540
  source 1..111: note = Description of Artificial Sequence: Synthetic polypeptide; note = VL of XENP022583

SEQ ID NO: 32691 - protein, 15 aa, synthetic construct
  source 1..15: note = Description of Artificial Sequence: Synthetic peptide; note = XENP022583 vlCDR1
RASQSVDYDGDSYMN

SEQ ID NO: 32692 - protein, 7 aa, synthetic construct
  source 1..7: note = Description of Artificial Sequence: Synthetic peptide; note = XENP022583 vlCDR2
AASELES

SEQ ID NO: 32693 - protein, 9 aa, synthetic construct
  source 1..9: note = Description of Artificial Sequence: Synthetic peptide; note = XENP022583 vlCDR3
QQSNEDPFT

SEQ ID NO: 32694 - protein, 226 aa, synthetic construct
  source 1..226: note = Description of Artificial Sequence: Synthetic polypeptide; note = XENP022588 7G8_H3.54_L1.30_Fab Heavy Chain
EVQLVESGGGLVQPGGSLRLSCAASGFTFDDAWMSWVRQAPGKGLEWVAEISTKANNHATYYAPSVKGRFTISRDDSKSSVYLQMNSLRAEDTAVYYCTRLATWDWYFDVWGQGTTVTVSSASTKGPSVFPLAPSSKSTSGGTAALGCLVKDYFPEPVTVSWNSGALTSGVHTFPAVLQSSGLYSLSSVVTVPSSSLGTQTYICNVNHKPSNTKVDKKVEPKSCGS

SEQ ID NO: 32695 - protein, 121 aa, synthetic construct
  source 1..121: note = Description of Artificial Sequence: Synthetic polypeptide; note = VH of XENP022588
EVQLVESGGGLVQPGGSLRLSCAASGFTFDDAWMSWVRQAPGKGLEWVAEISTKANNHATYYAPSVKGRFTISRDDSKSSVYLQMNSLRAEDTAVYYCTRLATWDWYFDVWGQGTTVTVSS

SEQ ID NO: 32696 - protein, 5 aa, synthetic construct
  source 1..5: note = Description of Artificial Sequence: Synthetic peptide; note = XENP022588 vhCDR1
DAWMS

SEQ ID NO: 32697 - protein, 19 aa, synthetic construct
  source 1..19: note = Description of Artificial Sequence: Synthetic peptide; note = XENP022588 vhCDR2
EISTKANNHATYYAPSVKG

SEQ ID NO: 32698 - protein, 10 aa, synthetic construct
  source 1..10: note = Description of Artificial Sequence: Synthetic peptide; note = XENP022588 vhCDR3
LATWDWYFDV

SEQ ID NO: 32699 - protein, 218 aa, synthetic construct; identical to SEQ ID NO: 22539
  source 1..218: note = Description of Artificial Sequence: Synthetic polypeptide; note = XENP022588 7G8_H3.54_L1.30_Fab Light Chain

SEQ ID NO: 32700 - protein, 111 aa, synthetic construct; identical to SEQ ID NO: 22540
  source 1..111: note = Description of Artificial Sequence: Synthetic polypeptide; note = VL of XENP022588

SEQ ID NO: 32701 - protein, 15 aa, synthetic construct
  source 1..15: note = Description of Artificial Sequence: Synthetic peptide; note = XENP022588 vlCDR1
RASQSVDYDGDSYMN

SEQ ID NO: 32702 - protein, 7 aa, synthetic construct
  source 1..7: note = Description of Artificial Sequence: Synthetic peptide; note = XENP022588 vlCDR2
AASELES

SEQ ID NO: 32703 - protein, 9 aa, synthetic construct
  source 1..9: note = Description of Artificial Sequence: Synthetic peptide; note = XENP022588 vlCDR3
QQSNEDPFT

SEQ ID NO: 32704 - protein, 226 aa, synthetic construct
  source 1..226: note = Description of Artificial Sequence: Synthetic polypeptide; note = XENP022589 7G8_H3.55_L1.30_Fab Heavy Chain
EVQLVESGGGLVQPGGSLRLSCAASGFTFDDAWMGWVRQAPGKGLEWVAEISTKANNHATYYAPSVKGRFTISRDDSKSSVYLQMNSLRAEDTAVYYCTRLATWDWYFDVWGQGTTVTVSSASTKGPSVFPLAPSSKSTSGGTAALGCLVKDYFPEPVTVSWNSGALTSGVHTFPAVLQSSGLYSLSSVVTVPSSSLGTQTYICNVNHKPSNTKVDKKVEPKSCGS

SEQ ID NO: 32705 - protein, 121 aa, synthetic construct
  source 1..121: note = Description of Artificial Sequence: Synthetic polypeptide; note = VH of XENP022589
EVQLVESGGGLVQPGGSLRLSCAASGFTFDDAWMGWVRQAPGKGLEWVAEISTKANNHATYYAPSVKGRFTISRDDSKSSVYLQMNSLRAEDTAVYYCTRLATWDWYFDVWGQGTTVTVSS

SEQ ID NO: 32706 - protein, 5 aa, synthetic construct
  source 1..5: note = Description of Artificial Sequence: Synthetic peptide; note = XENP022589 vhCDR1
DAWMG

SEQ ID NO: 32707 - protein, 19 aa, synthetic construct
  source 1..19: note = Description of Artificial Sequence: Synthetic peptide; note = XENP022589 vhCDR2
EISTKANNHATYYAPSVKG

SEQ ID NO: 32708 - protein, 10 aa, synthetic construct
  source 1..10: note = Description of Artificial Sequence: Synthetic peptide; note = XENP022589 vhCDR3
LATWDWYFDV

SEQ ID NO: 32709 - protein, 218 aa, synthetic construct; identical to SEQ ID NO: 22539
  source 1..218: note = Description of Artificial Sequence: Synthetic polypeptide; note = XENP022589 7G8_H3.55_L1.30_Fab Light Chain

SEQ ID NO: 32710 - protein, 111 aa, synthetic construct; identical to SEQ ID NO: 22540
  source 1..111: note = Description of Artificial Sequence: Synthetic polypeptide; note = VL of XENP022589

SEQ ID NO: 32711 - protein, 15 aa, synthetic construct
  source 1..15: note = Description of Artificial Sequence: Synthetic peptide; note = XENP022589 vlCDR1
RASQSVDYDGDSYMN

SEQ ID NO: 32712 - protein, 7 aa, synthetic construct
  source 1..7: note = Description of Artificial Sequence: Synthetic peptide; note = XENP022589 vlCDR2
AASELES

SEQ ID NO: 32713 - protein, 9 aa, synthetic construct
  source 1..9: note = Description of Artificial Sequence: Synthetic peptide; note = XENP022589 vlCDR3
QQSNEDPFT

SEQ ID NO: 32714 - protein, 226 aa, synthetic construct
  source 1..226: note = Description of Artificial Sequence: Synthetic polypeptide; note = XENP022590 7G8_H3.56_L1.30_Fab Heavy Chain
EVQLVESGGGLVQPGGSLRLSCAASGFTFDDAWMSWVRQAPGKGLEWVAEISTKANNHATYYAESVKGRFTISRDDSKSTVYLQMNSLRAEDTAVYYCTRLATWDWYFDVWGQGTTVTVSSASTKGPSVFPLAPSSKSTSGGTAALGCLVKDYFPEPVTVSWNSGALTSGVHTFPAVLQSSGLYSLSSVVTVPSSSLGTQTYICNVNHKPSNTKVDKKVEPKSCGS

SEQ ID NO: 32715 - protein, 121 aa, synthetic construct
  source 1..121: note = Description of Artificial Sequence: Synthetic polypeptide; note = VH of XENP022590
EVQLVESGGGLVQPGGSLRLSCAASGFTFDDAWMSWVRQAPGKGLEWVAEISTKANNHATYYAESVKGRFTISRDDSKSTVYLQMNSLRAEDTAVYYCTRLATWDWYFDVWGQGTTVTVSS

SEQ ID NO: 32716 - protein, 5 aa, synthetic construct
  source 1..5: note = Description of Artificial Sequence: Synthetic peptide; note = XENP022590 vhCDR1
DAWMS

SEQ ID NO: 32717 - protein, 19 aa, synthetic construct
  source 1..19: note = Description of Artificial Sequence: Synthetic peptide; note = XENP022590 vhCDR2
EISTKANNHATYYAESVKG

SEQ ID NO: 32718 - protein, 10 aa, synthetic construct
  source 1..10: note = Description of Artificial Sequence: Synthetic peptide; note = XENP022590 vhCDR3
LATWDWYFDV

SEQ ID NO: 32719 - protein, 218 aa, synthetic construct; identical to SEQ ID NO: 22539
  source 1..218: note = Description of Artificial Sequence: Synthetic polypeptide; note = XENP022590 7G8_H3.56_L1.30_Fab Light Chain

SEQ ID NO: 32720 - protein, 111 aa, synthetic construct; identical to SEQ ID NO: 22540
  source 1..111: note = Description of Artificial Sequence: Synthetic polypeptide; note = VL of XENP022590

SEQ ID NO: 32721 - protein, 15 aa, synthetic construct
  source 1..15: note = Description of Artificial Sequence: Synthetic peptide; note = XENP022590 vlCDR1
RASQSVDYDGDSYMN

SEQ ID NO: 32722 - protein, 7 aa, synthetic construct
  source 1..7: note = Description of Artificial Sequence: Synthetic peptide; note = XENP022590 vlCDR2
AASELES

SEQ ID NO: 32723 - protein, 9 aa, synthetic construct
  source 1..9: note = Description of Artificial Sequence: Synthetic peptide; note = XENP022590 vlCDR3
QQSNEDPFT

SEQ ID NO: 32724 - protein, 226 aa, synthetic construct
  source 1..226: note = Description of Artificial Sequence: Synthetic polypeptide; note = XENP022591 7G8_H3.57_L1.30_Fab Heavy Chain
EVQLVESGGGLVQPGGSLRLSCAASGFTFDDAWMGWVRQAPGKGLEWVAEISTKANNHATYYAESVKGRFTISRDDSKSTVYLQMNSLRAEDTAVYYCTRLATWDWYFDVWGQGTTVTVSSASTKGPSVFPLAPSSKSTSGGTAALGCLVKDYFPEPVTVSWNSGALTSGVHTFPAVLQSSGLYSLSSVVTVPSSSLGTQTYICNVNHKPSNTKVDKKVEPKSCGS

SEQ ID NO: 32725 - protein, 121 aa, synthetic construct
  source 1..121: note = Description of Artificial Sequence: Synthetic polypeptide; note = VH of XENP022591
EVQLVESGGGLVQPGGSLRLSCAASGFTFDDAWMGWVRQAPGKGLEWVAEISTKANNHATYYAESVKGRFTISRDDSKSTVYLQMNSLRAEDTAVYYCTRLATWDWYFDVWGQGTTVTVSS

SEQ ID NO: 32726 - protein, 5 aa, synthetic construct
  source 1..5: note = Description of Artificial Sequence: Synthetic peptide; note = XENP022591 vhCDR1
DAWMG

SEQ ID NO: 32727 - protein, 19 aa, synthetic construct
  source 1..19: note = Description of Artificial Sequence: Synthetic peptide; note = XENP022591 vhCDR2
EISTKANNHATYYAESVKG

SEQ ID NO: 32728 - protein, 10 aa, synthetic construct
  source 1..10: note = Description of Artificial Sequence: Synthetic peptide; note = XENP022591 vhCDR3
LATWDWYFDV

SEQ ID NO: 32729 - protein, 218 aa, synthetic construct; identical to SEQ ID NO: 22539
  source 1..218: note = Description of Artificial Sequence: Synthetic polypeptide; note = XENP022591 7G8_H3.57_L1.30_Fab Light Chain

SEQ ID NO: 32730 - protein, 111 aa, synthetic construct; identical to SEQ ID NO: 22540
  source 1..111: note = Description of Artificial Sequence: Synthetic polypeptide; note = VL of XENP022591

SEQ ID NO: 32731 - protein, 15 aa, synthetic construct
  source 1..15: note = Description of Artificial Sequence: Synthetic peptide; note = XENP022591 vlCDR1
RASQSVDYDGDSYMN

SEQ ID NO: 32732 - protein, 7 aa, synthetic construct
  source 1..7: note = Description of Artificial Sequence: Synthetic peptide; note = XENP022591 vlCDR2
AASELES

SEQ ID NO: 32733 - protein, 9 aa, synthetic construct
  source 1..9: note = Description of Artificial Sequence: Synthetic peptide; note = XENP022591 vlCDR3
QQSNEDPFT

SEQ ID NO: 32734 - protein, 226 aa, synthetic construct
  source 1..226: note = Description of Artificial Sequence: Synthetic polypeptide; note = XENP022592 7G8_H3.58_L1.30_Fab Heavy Chain
EVQLVESGGGLVQPGGSLRLSCAASGFTFDDAWMSWVRQAPGKGLEWVAEISTKANNHATYYAPSVKGRFTISRDDSKSTVYLQMNSLRAEDTAVYYCTRLATWDWYFDVWGQGTTVTVSSASTKGPSVFPLAPSSKSTSGGTAALGCLVKDYFPEPVTVSWNSGALTSGVHTFPAVLQSSGLYSLSSVVTVPSSSLGTQTYICNVNHKPSNTKVDKKVEPKSCGS

SEQ ID NO: 32735 - protein, 121 aa, synthetic construct
  source 1..121: note = Description of Artificial Sequence: Synthetic polypeptide; note = VH of XENP022592
EVQLVESGGGLVQPGGSLRLSCAASGFTFDDAWMSWVRQAPGKGLEWVAEISTKANNHATYYAPSVKGRFTISRDDSKSTVYLQMNSLRAEDTAVYYCTRLATWDWYFDVWGQGTTVTVSS

SEQ ID NO: 32736 - protein, 5 aa, synthetic construct
  source 1..5: note = Description of Artificial Sequence: Synthetic peptide; note = XENP022592 vhCDR1
DAWMS

SEQ ID NO: 32737 - protein, 19 aa, synthetic construct
  source 1..19: note = Description of Artificial Sequence: Synthetic peptide; note = XENP022592 vhCDR2
EISTKANNHATYYAPSVKG

SEQ ID NO: 32738 - protein, 10 aa, synthetic construct
  source 1..10: note = Description of Artificial Sequence: Synthetic peptide; note = XENP022592 vhCDR3
LATWDWYFDV

SEQ ID NO: 32739 - protein, 218 aa, synthetic construct; identical to SEQ ID NO: 22539
  source 1..218: note = Description of Artificial Sequence: Synthetic polypeptide; note = XENP022592 7G8_H3.58_L1.30_Fab Light Chain

SEQ ID NO: 32740 - protein, 111 aa, synthetic construct; identical to SEQ ID NO: 22540
  source 1..111: note = Description of Artificial Sequence: Synthetic polypeptide; note = VL of XENP022592

SEQ ID NO: 32741 - protein, 15 aa, synthetic construct
  source 1..15: note = Description of Artificial Sequence: Synthetic peptide; note = XENP022592 vlCDR1
RASQSVDYDGDSYMN

SEQ ID NO: 32742 - protein, 7 aa, synthetic construct
  source 1..7: note = Description of Artificial Sequence: Synthetic peptide; note = XENP022592 vlCDR2
AASELES

SEQ ID NO: 32743 - protein, 9 aa, synthetic construct
  source 1..9: note = Description of Artificial Sequence: Synthetic peptide; note = XENP022592 vlCDR3
QQSNEDPFT

SEQ ID NO: 32744 - protein, 226 aa, synthetic construct
  source 1..226: note = Description of Artificial Sequence: Synthetic polypeptide; note = XENP022593 7G8_H3.59_L1.30_Fab Heavy Chain
EVQLVESGGGLVQPGGSLRLSCAASGFTFDDAWMGWVRQAPGKGLEWVAEISTKANNHATYYAPSVKGRFTISRDDSKSTVYLQMNSLRAEDTAVYYCTRLATWDWYFDVWGQGTTVTVSSASTKGPSVFPLAPSSKSTSGGTAALGCLVKDYFPEPVTVSWNSGALTSGVHTFPAVLQSSGLYSLSSVVTVPSSSLGTQTYICNVNHKPSNTKVDKKVEPKSCGS

SEQ ID NO: 32745 - protein, 121 aa, synthetic construct
  source 1..121: note = Description of Artificial Sequence: Synthetic polypeptide; note = VH of XENP022593
EVQLVESGGGLVQPGGSLRLSCAASGFTFDDAWMGWVRQAPGKGLEWVAEISTKANNHATYYAPSVKGRFTISRDDSKSTVYLQMNSLRAEDTAVYYCTRLATWDWYFDVWGQGTTVTVSS

SEQ ID NO: 32746 - protein, 5 aa, synthetic construct
  source 1..5: note = Description of Artificial Sequence: Synthetic peptide; note = XENP022593 vhCDR1
DAWMG

SEQ ID NO: 32747 - protein, 19 aa, synthetic construct
  source 1..19: note = Description of Artificial Sequence: Synthetic peptide; note = XENP022593 vhCDR2
EISTKANNHATYYAPSVKG

SEQ ID NO: 32748 - protein, 10 aa, synthetic construct
  source 1..10: note = Description of Artificial Sequence: Synthetic peptide; note = XENP022593 vhCDR3
LATWDWYFDV

SEQ ID NO: 32749 - protein, 218 aa, synthetic construct; identical to SEQ ID NO: 22539
  source 1..218: note = Description of Artificial Sequence: Synthetic polypeptide; note = XENP022593 7G8_H3.59_L1.30_Fab Light Chain

SEQ ID NO: 32750 - protein, 111 aa, synthetic construct; identical to SEQ ID NO: 22540
  source 1..111: note = Description of Artificial Sequence: Synthetic polypeptide; note = VL of XENP022593

SEQ ID NO: 32751 - protein, 15 aa, synthetic construct
  source 1..15: note = Description of Artificial Sequence: Synthetic peptide; note = XENP022593 vlCDR1
RASQSVDYDGDSYMN

SEQ ID NO: 32752 - protein, 7 aa, synthetic construct
  source 1..7: note = Description of Artificial Sequence: Synthetic peptide; note = XENP022593 vlCDR2
AASELES

SEQ ID NO: 32753 - protein, 9 aa, synthetic construct
  source 1..9: note = Description of Artificial Sequence: Synthetic peptide; note = XENP022593 vlCDR3
QQSNEDPFT

SEQ ID NO: 32754 - protein, 226 aa, synthetic construct; identical to SEQ ID NO: 32254
  source 1..226: note = Description of Artificial Sequence: Synthetic polypeptide; note = XENP022594 7G8_H3.30_L1.34_Fab Heavy Chain

SEQ ID NO: 32755 - protein, 121 aa, synthetic construct; identical to SEQ ID NO: 22485
  source 1..121: note = Description of Artificial Sequence: Synthetic polypeptide; note = VH of XENP022594

SEQ ID NO: 32756 - protein, 5 aa, synthetic construct
  source 1..5: note = Description of Artificial Sequence: Synthetic peptide; note = XENP022594 vhCDR1
DAWMS

SEQ ID NO: 32757 - protein, 19 aa, synthetic construct
  source 1..19: note = Description of Artificial Sequence: Synthetic peptide; note = XENP022594 vhCDR2
EISTKANNHATYYAESVKG

SEQ ID NO: 32758 - protein, 10 aa, synthetic construct
  source 1..10: note = Description of Artificial Sequence: Synthetic peptide; note = XENP022594 vhCDR3
LATWDWYFDV

SEQ ID NO: 32759 - protein, 218 aa, synthetic construct; identical to SEQ ID NO: 22599
  source 1..218: note = Description of Artificial Sequence: Synthetic polypeptide; note = XENP022594 7G8_H3.30_L1.34_Fab Light Chain

SEQ ID NO: 32760 - protein, 111 aa, synthetic construct; identical to SEQ ID NO: 22600
  source 1..111: note = Description of Artificial Sequence: Synthetic polypeptide; note = VL of XENP022594

SEQ ID NO: 32761 - protein, 15 aa, synthetic construct
  source 1..15: note = Description of Artificial Sequence: Synthetic peptide; note = XENP022594 vlCDR1
RASQSVDYDGDSYMN

SEQ ID NO: 32762 - protein, 7 aa, synthetic construct
  source 1..7: note = Description of Artificial Sequence: Synthetic peptide; note = XENP022594 vlCDR2
AASELES

SEQ ID NO: 32763 - protein, 9 aa, synthetic construct
  source 1..9: note = Description of Artificial Sequence: Synthetic peptide; note = XENP022594 vlCDR3
QQSNEDPFT

SEQ ID NO: 32764 - protein, 226 aa, synthetic construct; identical to SEQ ID NO: 32254
  source 1..226: note = Description of Artificial Sequence: Synthetic polypeptide; note = XENP022595 7G8_H3.30_L1.36_Fab Heavy Chain

SEQ ID NO: 32765 - protein, 121 aa, synthetic construct; identical to SEQ ID NO: 22485
  source 1..121: note = Description of Artificial Sequence: Synthetic polypeptide; note = VH of XENP022595

SEQ ID NO: 32766 - protein, 5 aa, synthetic construct
  source 1..5: note = Description of Artificial Sequence: Synthetic peptide; note = XENP022595 vhCDR1
DAWMS

SEQ ID NO: 32767 - protein, 19 aa, synthetic construct
  source 1..19: note = Description of Artificial Sequence: Synthetic peptide; note = XENP022595 vhCDR2
EISTKANNHATYYAESVKG

SEQ ID NO: 32768 - protein, 10 aa, synthetic construct
  source 1..10: note = Description of Artificial Sequence: Synthetic peptide; note = XENP022595 vhCDR3
LATWDWYFDV

SEQ ID NO: 32769 - protein, 218 aa, synthetic construct; identical to SEQ ID NO: 22619
  source 1..218: note = Description of Artificial Sequence: Synthetic polypeptide; note = XENP022595 7G8_H3.30_L1.36_Fab Light Chain

SEQ ID NO: 32770 - protein, 111 aa, synthetic construct; identical to SEQ ID NO: 22620
  source 1..111: note = Description of Artificial Sequence: Synthetic polypeptide; note = VL of XENP022595

SEQ ID NO: 32771 - protein, 15 aa, synthetic construct
  source 1..15: note = Description of Artificial Sequence: Synthetic peptide; note = XENP022595 vlCDR1
RASQSVDHDGDSYMN

SEQ ID NO: 32772 - protein, 7 aa, synthetic construct
  source 1..7: note = Description of Artificial Sequence: Synthetic peptide; note = XENP022595 vlCDR2
AASELES

SEQ ID NO: 32773 - protein, 9 aa, synthetic construct
  source 1..9: note = Description of Artificial Sequence: Synthetic peptide; note = XENP022595 vlCDR3
QQSNEDPFT

SEQ ID NO: 32774 - protein, 226 aa, synthetic construct; identical to SEQ ID NO: 32284
  source 1..226: note = Description of Artificial Sequence: Synthetic polypeptide; note = XENP022596 7G8_H3.33_L1.34_Fab Heavy Chain

SEQ ID NO: 32775 - protein, 121 aa, synthetic construct; identical to SEQ ID NO: 22505
  source 1..121: note = Description of Artificial Sequence: Synthetic polypeptide; note = VH of XENP022596

SEQ ID NO: 32776 - protein, 5 aa, synthetic construct
  source 1..5: note = Description of Artificial Sequence: Synthetic peptide; note = XENP022596 vhCDR1
DAWMG

SEQ ID NO: 32777 - protein, 19 aa, synthetic construct
  source 1..19: note = Description of Artificial Sequence: Synthetic peptide; note = XENP022596 vhCDR2
EISTKANNHATYYAESVKG

SEQ ID NO: 32778 - protein, 10 aa, synthetic construct
  source 1..10: note = Description of Artificial Sequence: Synthetic peptide; note = XENP022596 vhCDR3
LATWDWYFDV

SEQ ID NO: 32779 - protein, 218 aa, synthetic construct; identical to SEQ ID NO: 22599
  source 1..218: note = Description of Artificial Sequence: Synthetic polypeptide; note = XENP022596 7G8_H3.33_L1.34_Fab Light Chain

SEQ ID NO: 32780 - protein, 111 aa, synthetic construct; identical to SEQ ID NO: 22600
  source 1..111: note = Description of Artificial Sequence: Synthetic polypeptide; note = VL of XENP022596

SEQ ID NO: 32781 - protein, 15 aa, synthetic construct
  source 1..15: note = Description of Artificial Sequence: Synthetic peptide; note = XENP022596 vlCDR1
RASQSVDYDGDSYMN

SEQ ID NO: 32782 - protein, 7 aa, synthetic construct
  source 1..7: note = Description of Artificial Sequence: Synthetic peptide; note = XENP022596 vlCDR2
AASELES

SEQ ID NO: 32783 - protein, 9 aa, synthetic construct
  source 1..9: note = Description of Artificial Sequence: Synthetic peptide; note = XENP022596 vlCDR3
QQSNEDPFT

SEQ ID NO: 32784 - protein, 226 aa, synthetic construct; identical to SEQ ID NO: 32284
  source 1..226: note = Description of Artificial Sequence: Synthetic polypeptide; note = XENP022601 7G8_H3.33_L1.36_Fab Heavy Chain

SEQ ID NO: 32785 - protein, 121 aa, synthetic construct; identical to SEQ ID NO: 22505
  source 1..121: note = Description of Artificial Sequence: Synthetic polypeptide; note = VH of XENP022601

SEQ ID NO: 32786 - protein, 5 aa, synthetic construct
  source 1..5: note = Description of Artificial Sequence: Synthetic peptide; note = XENP022601 vhCDR1
DAWMG

SEQ ID NO: 32787 - protein, 19 aa, synthetic construct
  source 1..19: note = Description of Artificial Sequence: Synthetic peptide; note = XENP022601 vhCDR2
EISTKANNHATYYAESVKG

SEQ ID NO: 32788 - protein, 10 aa, synthetic construct
  source 1..10: note = Description of Artificial Sequence: Synthetic peptide; note = XENP022601 vhCDR3
LATWDWYFDV

SEQ ID NO: 32789 - protein, 218 aa, synthetic construct; identical to SEQ ID NO: 22619
  source 1..218: note = Description of Artificial Sequence: Synthetic polypeptide; note = XENP022601 7G8_H3.33_L1.36_Fab Light Chain

SEQ ID NO: 32790 - protein, 111 aa, synthetic construct; identical to SEQ ID NO: 22620
  source 1..111: note = Description of Artificial Sequence: Synthetic polypeptide; note = VL of XENP022601

SEQ ID NO: 32791 - protein, 15 aa, synthetic construct
  source 1..15: note = Description of Artificial Sequence: Synthetic peptide; note = XENP022601 vlCDR1
RASQSVDHDGDSYMN

SEQ ID NO: 32792 - protein, 7 aa, synthetic construct
  source 1..7: note = Description of Artificial Sequence: Synthetic peptide; note = XENP022601 vlCDR2
AASELES

SEQ ID NO: 32793 - protein, 9 aa, synthetic construct
  source 1..9: note = Description of Artificial Sequence: Synthetic peptide; note = XENP022601 vlCDR3
QQSNEDPFT

SEQ ID NO: 32794 - protein, 447 aa, synthetic construct; identical to SEQ ID NO: 22064
  source 1..447: note = Description of Artificial Sequence: Synthetic polypeptide; note = XENP022511 2A11_H1.125_L2.113-one-arm Fab-Fc Heavy Chain

SEQ ID NO: 32795 - protein, 118 aa, synthetic construct; identical to SEQ ID NO: 22065
  source 1..118: note = Description of Artificial Sequence: Synthetic polypeptide; note = VH of XENP022511

SEQ ID NO: 32796 - protein, 5 aa, synthetic construct
  source 1..5: note = Description of Artificial Sequence: Synthetic peptide; note = XENP022511 vhCDR1
HYFMH

SEQ ID NO: 32797 - protein, 17 aa, synthetic construct
  source 1..17: note = Description of Artificial Sequence: Synthetic peptide; note = XENP022511 vhCDR2
WIDPYLGDTEYAPKFQG

SEQ ID NO: 32798 - protein, 9 aa, synthetic construct
  source 1..9: note = Description of Artificial Sequence: Synthetic peptide; note = XENP022511 vhCDR3
RGVYQALDY

SEQ ID NO: 32799 - protein, 231 aa, synthetic construct
  source 1..231: note = Description of Artificial Sequence: Synthetic polypeptide; note = XENP022511 2A11_H1.125_L2.113-one-arm Fc only Heavy Chain
ERKSSDKTHTCPRCPAPPVAGPSVFLFPPKPKDTLMISRTPEVTCVVVDVKHEDPEVKFKWYVDGVEVHNAKTKPREEQYNSTYRVVSVLTVLHQDWLNGKEYKCKVSNKALPAPIEKTISKAKGQPREPQVYTLPPSREQMTKNQVKLTCLVKGFYPSDIAVEWESNGQPENNYKTTPPVLDSDGSFFLYSKLTVDKSRWQQGNVFSCSVMHEALHNHYTQKSLSLSPGK

SEQ ID NO: 32800 - protein, 214 aa, synthetic construct; identical to SEQ ID NO: 22079
  source 1..214: note = Description of Artificial Sequence: Synthetic polypeptide; note = XENP022511 2A11_H1.125_L2.113-one-arm Light Chain

SEQ ID NO: 32801 - protein, 107 aa, synthetic construct; identical to SEQ ID NO: 22080
  source 1..107: note = Description of Artificial Sequence: Synthetic polypeptide; note = VL of XENP022511

SEQ ID NO: 32802 - protein, 11 aa, synthetic construct
  source 1..11: note = Description of Artificial Sequence: Synthetic peptide; note = XENP022511 vlCDR1
QASQDIGNYLN

SEQ ID NO: 32803 - protein, 7 aa, synthetic construct
  source 1..7: note = Description of Artificial Sequence: Synthetic peptide; note = XENP022511 vlCDR2
FTSYLHS

SEQ ID NO: 32804 - protein, 9 aa, synthetic construct
  source 1..9: note = Description of Artificial Sequence: Synthetic peptide; note = XENP022511 vlCDR3
QQGNTLPYT

SEQ ID NO: 32805 - protein, 447 aa, synthetic construct; identical to SEQ ID NO: 22084
  source 1..447: note = Description of Artificial Sequence: Synthetic polypeptide; note = XENP022512 2A11_H1.144_L2.113-one-arm Fab-Fc Heavy Chain

SEQ ID NO: 32806 - protein, 118 aa, synthetic construct; identical to SEQ ID NO: 22085
  source 1..118: note = Description of Artificial Sequence: Synthetic polypeptide; note = VH of XENP022512

SEQ ID NO: 32807 - protein, 5 aa, synthetic construct
  source 1..5: note = Description of Artificial Sequence: Synthetic peptide; note = XENP022512 vhCDR1
DYFMH

SEQ ID NO: 32808 - protein, 17 aa, synthetic construct
  source 1..17: note = Description of Artificial Sequence: Synthetic peptide; note = XENP022512 vhCDR2
WIDPELGDTEYAPKFQG

SEQ ID NO: 32809 - protein, 9 aa, synthetic construct
  source 1..9: note = Description of Artificial Sequence: Synthetic peptide; note = XENP022512 vhCDR3
RGVYQALDY

SEQ ID NO: 32810 - protein, 231 aa, synthetic construct; identical to SEQ ID NO: 32799
  source 1..231: note = Description of Artificial Sequence: Synthetic polypeptide; note = XENP022512 2A11_H1.144_L2.113-one-arm Fc only Heavy Chain

SEQ ID NO: 32811 - protein, 214 aa, synthetic construct; identical to SEQ ID NO: 22079
  source 1..214: note = Description of Artificial Sequence: Synthetic polypeptide; note = XENP022512 2A11_H1.144_L2.113-one-arm Light Chain

SEQ ID NO: 32812 - protein, 107 aa, synthetic construct; identical to SEQ ID NO: 22080
  source 1..107: note = Description of Artificial Sequence: Synthetic polypeptide; note = VL of XENP022512

SEQ ID NO: 32813 - protein, 11 aa, synthetic construct
  source 1..11: note = Description of Artificial Sequence: Synthetic peptide; note = XENP022512 vlCDR1
QASQDIGNYLN

SEQ ID NO: 32814 - protein, 7 aa, synthetic construct
  source 1..7: note = Description of Artificial Sequence: Synthetic peptide; note = XENP022512 vlCDR2
FTSYLHS

SEQ ID NO: 32815 - protein, 9 aa, synthetic construct
  source 1..9: note = Description of Artificial Sequence: Synthetic peptide; note = XENP022512 vlCDR3
QQGNTLPYT

SEQ ID NO: 32816 - protein, 447 aa, synthetic construct; identical to SEQ ID NO: 22104
  source 1..447: note = Description of Artificial Sequence: Synthetic polypeptide; note = XENP022513 2A11_H1.117_L2.116-one-arm Fab-Fc Heavy Chain

SEQ ID NO: 32817 - protein, 118 aa, synthetic construct; identical to SEQ ID NO: 22105
  source 1..118: note = Description of Artificial Sequence: Synthetic polypeptide; note = VH of XENP022513

SEQ ID NO: 32818 - protein, 5 aa, synthetic construct
  source 1..5: note = Description of Artificial Sequence: Synthetic peptide; note = XENP022513 vhCDR1
HYFMH

SEQ ID NO: 32819 - protein, 17 aa, synthetic construct
  source 1..17: note = Description of Artificial Sequence: Synthetic peptide; note = XENP022513 vhCDR2
WIDPYLGDTEYAPKFQG

SEQ ID NO: 32820 - protein, 9 aa, synthetic construct
  source 1..9: note = Description of Artificial Sequence: Synthetic peptide; note = XENP022513 vhCDR3
RGVRQALDY

SEQ ID NO: 32821 - protein, 231 aa, synthetic construct; identical to SEQ ID NO: 32799
  source 1..231: note = Description of Artificial Sequence: Synthetic polypeptide; note = XENP022513 2A11_H1.117_L2.116-one-arm Fc only Heavy Chain

SEQ ID NO: 32822 - protein, 214 aa, synthetic construct; identical to SEQ ID NO: 22119
  source 1..214: note = Description of Artificial Sequence: Synthetic polypeptide; note = XENP022513 2A11_H1.117_L2.116-one-arm Light Chain

SEQ ID NO: 32823 - protein, 107 aa, synthetic construct; identical to SEQ ID NO: 22120
  source 1..107: note = Description of Artificial Sequence: Synthetic polypeptide; note = VL of XENP022513

SEQ ID NO: 32824 - protein, 11 aa, synthetic construct
  source 1..11: note = Description of Artificial Sequence: Synthetic peptide; note = XENP022513 vlCDR1
QASQDIGNYLN

SEQ ID NO: 32825 - protein, 7 aa, synthetic construct
  source 1..7: note = Description of Artificial Sequence: Synthetic peptide; note = XENP022513 vlCDR2
FTSHLHS

SEQ ID NO: 32826 - protein, 9 aa, synthetic construct
  source 1..9: note = Description of Artificial Sequence: Synthetic peptide; note = XENP022513 vlCDR3
QQGHQLPYT

SEQ ID NO: 32827 - protein, 447 aa, synthetic construct; identical to SEQ ID NO: 22084
  source 1..447: note = Description of Artificial Sequence: Synthetic polypeptide; note = XENP022514 2A11_H1.144_L2-one-arm Fab-Fc Heavy Chain

SEQ ID NO: 32828 - protein, 118 aa, synthetic construct; identical to SEQ ID NO: 22085
  source 1..118: note = Description of Artificial Sequence: Synthetic polypeptide; note = VH of XENP022514

SEQ ID NO: 32829 - protein, 5 aa, synthetic construct
  source 1..5: note = Description of Artificial Sequence: Synthetic peptide; note = XENP022514 vhCDR1
DYFMH

SEQ ID NO: 32830 - protein, 17 aa, synthetic construct
  source 1..17: note = Description of Artificial Sequence: Synthetic peptide; note = XENP022514 vhCDR2
WIDPELGDTEYAPKFQG

SEQ ID NO: 32831 - protein, 9 aa, synthetic construct
  source 1..9: note = Description of Artificial Sequence: Synthetic peptide; note = XENP022514 vhCDR3
RGVYQALDY

SEQ ID NO: 32832 - protein, 231 aa, synthetic construct; identical to SEQ ID NO: 32799
  source 1..231: note = Description of Artificial Sequence: Synthetic polypeptide; note = XENP022514 2A11_H1.144_L2-one-arm Fc only Heavy Chain

SEQ ID NO: 32833 - protein, 214 aa, synthetic construct; identical to SEQ ID NO: 17250
  source 1..214: note = Description of Artificial Sequence: Synthetic polypeptide; note = XENP022514 2A11_H1.144_L2-one-arm Light Chain

SEQ ID NO: 32834 - protein, 107 aa, synthetic construct; identical to SEQ ID NO: 17251
  source 1..107: note = Description of Artificial Sequence: Synthetic polypeptide; note = VL of XENP022514

SEQ ID NO: 32835 - protein, 11 aa, synthetic construct
  source 1..11: note = Description of Artificial Sequence: Synthetic peptide; note = XENP022514 vlCDR1
QASQDIGNYLN

SEQ ID NO: 32836 - protein, 7 aa, synthetic construct
  source 1..7: note = Description of Artificial Sequence: Synthetic peptide; note = XENP022514 vlCDR2
YTSRLHS

SEQ ID NO: 32837 - protein, 9 aa, synthetic construct
  source 1..9: note = Description of Artificial Sequence: Synthetic peptide; note = XENP022514 vlCDR3
QQGNTLPYT

SEQ ID NO: 32838 - protein, 447 aa, synthetic construct; identical to SEQ ID NO: 17235
  source 1..447: note = Description of Artificial Sequence: Synthetic polypeptide; note = XENP022515 2A11_H1_L2.113-one-arm Fab-Fc Heavy Chain

SEQ ID NO: 32839 - protein, 118 aa, synthetic construct; identical to SEQ ID NO: 17236
  source 1..118: note = Description of Artificial Sequence: Synthetic polypeptide; note = VH of XENP022515

SEQ ID NO: 32840 - protein, 5 aa, synthetic construct
  source 1..5: note = Description of Artificial Sequence: Synthetic peptide; note = XENP022515 vhCDR1
DYYMH

SEQ ID NO: 32841 - protein, 17 aa, synthetic construct
  source 1..17: note = Description of Artificial Sequence: Synthetic peptide; note = XENP022515 vhCDR2
WIDPENGDTEYAPKFQG

SEQ ID NO: 32842 - protein, 9 aa, synthetic construct
  source 1..9: note = Description of Artificial Sequence: Synthetic peptide; note = XENP022515 vhCDR3
RGVRQALDY

SEQ ID NO: 32843 - protein, 231 aa, synthetic construct; identical to SEQ ID NO: 32799
  source 1..231: note = Description of Artificial Sequence: Synthetic polypeptide; note = XENP022515 2A11_H1_L2.113-one-arm Fc only Heavy Chain

SEQ ID NO: 32844 - protein, 214 aa, synthetic construct; identical to SEQ ID NO: 22079
  source 1..214: note = Description of Artificial Sequence: Synthetic polypeptide; note = XENP022515 2A11_H1_L2.113-one-arm Light Chain

SEQ ID NO: 32845 - protein, 107 aa, synthetic construct; identical to SEQ ID NO: 22080
  source 1..107: note = Description of Artificial Sequence: Synthetic polypeptide; note = VL of XENP022515

SEQ ID NO: 32846 - protein, 11 aa, synthetic construct
  source 1..11: note = Description of Artificial Sequence: Synthetic peptide; note = XENP022515 vlCDR1
QASQDIGNYLN

SEQ ID NO: 32847 - protein, 7 aa, synthetic construct
  source 1..7: note = Description of Artificial Sequence: Synthetic peptide; note = XENP022515 vlCDR2
FTSYLHS

SEQ ID NO: 32848 - protein, 9 aa, synthetic construct
  source 1..9: note = Description of Artificial Sequence: Synthetic peptide; note = XENP022515 vlCDR3
QQGNTLPYT

SEQ ID NO: 32849 - protein, 447 aa, synthetic construct; identical to SEQ ID NO: 17235
  source 1..447: note = Description of Artificial Sequence: Synthetic polypeptide; note = XENP022516 2A11_H1L2-one-arm Fab-Fc Heavy Chain

SEQ ID NO: 32850 - protein, 118 aa, synthetic construct; identical to SEQ ID NO: 17236
  source 1..118: note = Description of Artificial Sequence: Synthetic polypeptide; note = VH of XENP022516

SEQ ID NO: 32851 - protein, 5 aa, synthetic construct
  source 1..5: note = Description of Artificial Sequence: Synthetic peptide; note = XENP022516 vhCDR1
DYYMH

SEQ ID NO: 32852 - protein, 17 aa, synthetic construct
  source 1..17: note = Description of Artificial Sequence: Synthetic peptide; note = XENP022516 vhCDR2
WIDPENGDTEYAPKFQG

SEQ ID NO: 32853 - protein, 9 aa, synthetic construct
  source 1..9: note = Description of Artificial Sequence: Synthetic peptide; note = XENP022516 vhCDR3
RGVRQALDY

SEQ ID NO: 32854 - protein, 231 aa, synthetic construct; identical to SEQ ID NO: 32799
  source 1..231: note = Description of Artificial Sequence: Synthetic polypeptide; note = XENP022516 2A11_H1L2-one-arm Fc only Heavy Chain

SEQ ID NO: 32855 - protein, 214 aa, synthetic construct; identical to SEQ ID NO: 17250
  source 1..214: note = Description of Artificial Sequence: Synthetic polypeptide; note = XENP022516 2A11_H1L2-one-arm Light Chain

SEQ ID NO: 32856 - protein, 107 aa, synthetic construct; identical to SEQ ID NO: 17251
  source 1..107: note = Description of Artificial Sequence: Synthetic polypeptide; note = VL of XENP022516

SEQ ID NO: 32857 - protein, 11 aa, synthetic construct
  source 1..11: note = Description of Artificial Sequence: Synthetic peptide; note = XENP022516 vlCDR1
QASQDIGNYLN

SEQ ID NO: 32858 - protein, 7 aa, synthetic construct
  source 1..7: note = Description of Artificial Sequence: Synthetic peptide; note = XENP022516 vlCDR2
YTSRLHS

SEQ ID NO: 32859 - protein, 9 aa, synthetic construct
  source 1..9: note = Description of Artificial Sequence: Synthetic peptide; note = XENP022516 vlCDR3
QQGNTLPYT

SEQ ID NO: 32860 - protein, 447 aa, synthetic construct; identical to SEQ ID NO: 17235
  source 1..447: note = Description of Artificial Sequence: Synthetic polypeptide; note = XENP022517 2A11_H1_L2.25-one-arm Fab-Fc Heavy Chain

SEQ ID NO: 32861 - protein, 118 aa, synthetic construct; identical to SEQ ID NO: 17236
  source 1..118: note = Description of Artificial Sequence: Synthetic polypeptide; note = VH of XENP022517

SEQ ID NO: 32862 - protein, 5 aa, synthetic construct
  source 1..5: note = Description of Artificial Sequence: Synthetic peptide; note = XENP022517 vhCDR1
DYYMH

SEQ ID NO: 32863 - protein, 17 aa, synthetic construct
  source 1..17: note = Description of Artificial Sequence: Synthetic peptide; note = XENP022517 vhCDR2
WIDPENGDTEYAPKFQG

SEQ ID NO: 32864 - protein, 9 aa, synthetic construct
  source 1..9: note = Description of Artificial Sequence: Synthetic peptide; note = XENP022517 vhCDR3
RGVRQALDY

SEQ ID NO: 32865 - protein, 231 aa, synthetic construct; identical to SEQ ID NO: 32799
  source 1..231: note = Description of Artificial Sequence: Synthetic polypeptide; note = XENP022517 2A11_H1_L2.25-one-arm Fc only Heavy Chain

SEQ ID NO: 32866 - protein, 214 aa, synthetic construct; identical to SEQ ID NO: 22179
  source 1..214: note = Description of Artificial Sequence: Synthetic polypeptide; note = XENP022517 2A11_H1_L2.25-one-arm Light Chain

SEQ ID NO: 32867 - protein, 107 aa, synthetic construct; identical to SEQ ID NO: 22180
  source 1..107: note = Description of Artificial Sequence: Synthetic polypeptide; note = VL of XENP022517

SEQ ID NO: 32868 - protein, 11 aa, synthetic construct
  source 1..11: note = Description of Artificial Sequence: Synthetic peptide; note = XENP022517 vlCDR1
QASQDIGNHLN

SEQ ID NO: 32869 - protein, 7 aa, synthetic construct
  source 1..7: note = Description of Artificial Sequence: Synthetic peptide; note = XENP022517 vlCDR2
YTSRLHS

SEQ ID NO: 32870 - protein, 9 aa, synthetic construct
  source 1..9: note = Description of Artificial Sequence: Synthetic peptide; note = XENP022517 vlCDR3
QQGNTLPYT

SEQ ID NO: 32871 - protein, 447 aa, synthetic construct; identical to SEQ ID NO: 22064
  source 1..447: note = Description of Artificial Sequence: Synthetic polypeptide; note = XENP022674 2A11_H1.125_L2.126-one-arm Fab-Fc Heavy Chain

SEQ ID NO: 32872 - protein, 118 aa, synthetic construct; identical to SEQ ID NO: 22065
  source 1..118: note = Description of Artificial Sequence: Synthetic polypeptide; note = VH of XENP022674

SEQ ID NO: 32873 - protein, 5 aa, synthetic construct
  source 1..5: note = Description of Artificial Sequence: Synthetic peptide; note = XENP022674 vhCDR1
HYFMH

SEQ ID NO: 32874 - protein, 17 aa, synthetic construct
  source 1..17: note = Description of Artificial Sequence: Synthetic peptide; note = XENP022674 vhCDR2
WIDPYLGDTEYAPKFQG

SEQ ID NO: 32875 - protein, 9 aa, synthetic construct
  source 1..9: note = Description of Artificial Sequence: Synthetic peptide; note = XENP022674 vhCDR3
RGVYQALDY

SEQ ID NO: 32876 - protein, 231 aa, synthetic construct; identical to SEQ ID NO: 32799
  source 1..231: note = Description of Artificial Sequence: Synthetic polypeptide; note = XENP022674 2A11_H1.125_L2.126-one-arm Fc only Heavy Chain

SEQ ID NO: 32877 - protein, 214 aa, synthetic construct; identical to SEQ ID NO: 22259
  source 1..214: note = Description of Artificial Sequence: Synthetic polypeptide; note = XENP022674 2A11_H1.125_L2.126-one-arm Light Chain

SEQ ID NO: 32878 - protein, 107 aa, synthetic construct; identical to SEQ ID NO: 22260
  source 1..107: note = Description of Artificial Sequence: Synthetic polypeptide; note = VL of XENP022674

SEQ ID NO: 32879 - protein, 11 aa, synthetic construct
  source 1..11: note = Description of Artificial Sequence: Synthetic peptide; note = XENP022674 vlCDR1
QASQDIGNYLN

SEQ ID NO: 32880 - protein, 7 aa, synthetic construct
  source 1..7: note = Description of Artificial Sequence: Synthetic peptide; note = XENP022674 vlCDR2
FTSYLHS

SEQ ID NO: 32881 - protein, 9 aa, synthetic construct
  source 1..9: note = Description of Artificial Sequence: Synthetic peptide; note = XENP022674 vlCDR3
QEGNTLPYT

SEQ ID NO: 32882 - protein, 447 aa, synthetic construct; identical to SEQ ID NO: 22084
  source 1..447: note = Description of Artificial Sequence: Synthetic polypeptide; note = XENP022676 2A11_H1.144_L2.142-one-arm Fab-Fc Heavy Chain

SEQ ID NO: 32883 - protein, 118 aa, synthetic construct; identical to SEQ ID NO: 22085
  source 1..118: note = Description of Artificial Sequence: Synthetic polypeptide; note = VH of XENP022676

SEQ ID NO: 32884 - protein, 5 aa, synthetic construct
  source 1..5: note = Description of Artificial Sequence: Synthetic peptide; note = XENP022676 vhCDR1
DYFMH

SEQ ID NO: 32885 - protein, 17 aa, synthetic construct
  source 1..17: note = Description of Artificial Sequence: Synthetic peptide; note = XENP022676 vhCDR2
WIDPELGDTEYAPKFQG

SEQ ID NO: 32886 - protein, 9 aa, synthetic construct
  source 1..9: note = Description of Artificial Sequence: Synthetic peptide; note = XENP022676 vhCDR3
RGVYQALDY

SEQ ID NO: 32887 - protein, 231 aa, synthetic construct; identical to SEQ ID NO: 32799
  source 1..231: note = Description of Artificial Sequence: Synthetic polypeptide; note = XENP022676 2A11_H1.144_L2.142-one-arm Fc only Heavy Chain

SEQ ID NO: 32888 - protein, 214 aa, synthetic construct; identical to SEQ ID NO: 22279
  source 1..214: note = Description of Artificial Sequence: Synthetic polypeptide; note = XENP022676 2A11_H1.144_L2.142-one-arm Light Chain

SEQ ID NO: 32889 - protein, 107 aa, synthetic construct; identical to SEQ ID NO: 22280
  source 1..107: note = Description of Artificial Sequence: Synthetic polypeptide; note = VL of XENP022676

SEQ ID NO: 32890 - protein, 11 aa, synthetic construct
  source 1..11: note = Description of Artificial Sequence: Synthetic peptide; note = XENP022676 vlCDR1
QASQDIGNYLN

SEQ ID NO: 32891 - protein, 7 aa, synthetic construct
  source 1..7: note = Description of Artificial Sequence: Synthetic peptide; note = XENP022676 vlCDR2
FTSYLHS

SEQ ID NO: 32892 - protein, 9 aa, synthetic construct
  source 1..9: note = Description of Artificial Sequence: Synthetic peptide; note = XENP022676 vlCDR3
QQGNTLPYT

SEQ ID NO: 32893 - protein, 450 aa, synthetic construct; identical to SEQ ID NO: 22324
  source 1..450: note = Description of Artificial Sequence: Synthetic polypeptide; note = XENP022519 7G8_H3.18_L1.11-one-arm Fab-Fc Heavy Chain

SEQ ID NO: 32894 - protein, 121 aa, synthetic construct; identical to SEQ ID NO: 22325
  source 1..121: note = Description of Artificial Sequence: Synthetic polypeptide; note = VH of XENP022519

SEQ ID NO: 32895 - protein, 5 aa, synthetic construct
  source 1..5: note = Description of Artificial Sequence: Synthetic peptide; note = XENP022519 vhCDR1
DAWMD

SEQ ID NO: 32896 - protein, 19 aa, synthetic construct
  source 1..19: note = Description of Artificial Sequence: Synthetic peptide; note = XENP022519 vhCDR2
EISTKANNHATYYAESVKG

SEQ ID NO: 32897 - protein, 10 aa, synthetic construct
  source 1..10: note = Description of Artificial Sequence: Synthetic peptide; note = XENP022519 vhCDR3
LATWDWYFDV

SEQ ID NO: 32898 - protein, 231 aa, synthetic construct; identical to SEQ ID NO: 32799
  source 1..231: note = Description of Artificial Sequence: Synthetic polypeptide; note = XENP022519 7G8_H3.18_L1.11-one-arm Fc-only Heavy Chain

SEQ ID NO: 32899 - protein, 218 aa, synthetic construct; identical to SEQ ID NO: 22359
  source 1..218: note = Description of Artificial Sequence: Synthetic polypeptide; note = XENP022519 7G8_H3.18_L1.11-one-arm Light Chain

SEQ ID NO: 32900 - protein, 111 aa, synthetic construct; identical to SEQ ID NO: 22360
  source 1..111: note = Description of Artificial Sequence: Synthetic polypeptide; note = VL of XENP022519

SEQ ID NO: 32901 - protein, 15 aa, synthetic construct
  source 1..15: note = Description of Artificial Sequence: Synthetic peptide; note = XENP022519 vlCDR1
RASQSVDYDGDSYMN

SEQ ID NO: 32902 - protein, 7 aa, synthetic construct
  source 1..7: note = Description of Artificial Sequence: Synthetic peptide; note = XENP022519 vlCDR2
AASELES

SEQ ID NO: 32903 - protein, 9 aa, synthetic construct
  source 1..9: note = Description of Artificial Sequence: Synthetic peptide; note = XENP022519 vlCDR3
QQSNEDPFT

SEQ ID NO: 32904 - protein, 450 aa, synthetic construct; identical to SEQ ID NO: 22424
  source 1..450: note = Description of Artificial Sequence: Synthetic polypeptide; note = XENP022520 7G8_H3.28_L1.13-one-arm Fab-Fc Heavy Chain

SEQ ID NO: 32905 - protein, 121 aa, synthetic construct; identical to SEQ ID NO: 22425
  source 1..121: note = Description of Artificial Sequence: Synthetic polypeptide; note = VH of XENP022520

SEQ ID NO: 32906 - protein, 5 aa, synthetic construct
  source 1..5: note = Description of Artificial Sequence: Synthetic peptide; note = XENP022520 vhCDR1
DAWMD

SEQ ID NO: 32907 - protein, 19 aa, synthetic construct
  source 1..19: note = Description of Artificial Sequence: Synthetic peptide; note = XENP022520 vhCDR2
EISTKAYNHATYYAESVKG

SEQ ID NO: 32908 - protein, 10 aa, synthetic construct
  source 1..10: note = Description of Artificial Sequence: Synthetic peptide; note = XENP022520 vhCDR3
LATWDWYFDV

SEQ ID NO: 32909 - protein, 231 aa, synthetic construct; identical to SEQ ID NO: 32799
  source 1..231: note = Description of Artificial Sequence: Synthetic polypeptide; note = XENP022520 7G8_H3.28_L1.13-one-arm Fc-only Heavy Chain

SEQ ID NO: 32910 - protein, 218 aa, synthetic construct; identical to SEQ ID NO: 22419
  source 1..218: note = Description of Artificial Sequence: Synthetic polypeptide; note = XENP022520 7G8_H3.28_L1.13-one-arm Light Chain

SEQ ID NO: 32911 - protein, 111 aa, synthetic construct; identical to SEQ ID NO: 22420
  source 1..111: note = Description of Artificial Sequence: Synthetic polypeptide; note = VL of XENP022520

SEQ ID NO: 32912 - protein, 15 aa, synthetic construct
  source 1..15: note = Description of Artificial Sequence: Synthetic peptide; note = XENP022520 vlCDR1
RASQSVDHDGDSYMN

SEQ ID NO: 32913 - protein, 7 aa, synthetic construct
  source 1..7: note = Description of Artificial Sequence: Synthetic peptide; note = XENP022520 vlCDR2
AASELES

SEQ ID NO: 32914 - protein, 9 aa, synthetic construct
  source 1..9: note = Description of Artificial Sequence: Synthetic peptide; note = XENP022520 vlCDR3
QQSNEDPFT

SEQ ID NO: 32915 - protein, 450 aa, synthetic construct; identical to SEQ ID NO: 22484
  source 1..450: note = Description of Artificial Sequence: Synthetic polypeptide; note = XENP022560 7G8_H3.30_L1.11-one-arm Fab-Fc Heavy Chain

SEQ ID NO: 32916 - protein, 121 aa, synthetic construct; identical to SEQ ID NO: 22485
  source 1..121: note = Description of Artificial Sequence: Synthetic polypeptide; note = VH of XENP022560

SEQ ID NO: 32917 - protein, 5 aa, synthetic construct
  source 1..5: note = Description of Artificial Sequence: Synthetic peptide; note = XENP022560 vhCDR1
DAWMS

SEQ ID NO: 32918 - protein, 19 aa, synthetic construct
  source 1..19: note = Description of Artificial Sequence: Synthetic peptide; note = XENP022560 vhCDR2
EISTKANNHATYYAESVKG

SEQ ID NO: 32919 - protein, 10 aa, synthetic construct
  source 1..10: note = Description of Artificial Sequence: Synthetic peptide; note = XENP022560 vhCDR3
LATWDWYFDV

SEQ ID NO: 32920 - protein, 231 aa, synthetic construct; identical to SEQ ID NO: 32799
  source 1..231: note = Description of Artificial Sequence: Synthetic polypeptide; note = XENP022560 7G8_H3.30_L1.11-one-arm Fc-only Heavy Chain

SEQ ID NO: 32921 - protein, 218 aa, synthetic construct; identical to SEQ ID NO: 22359
  source 1..218: note = Description of Artificial Sequence: Synthetic polypeptide; note = XENP022560 7G8_H3.30_L1.11-one-arm Light Chain

SEQ ID NO: 32922 - protein, 111 aa, synthetic construct; identical to SEQ ID NO: 22360
  source 1..111: note = Description of Artificial Sequence: Synthetic polypeptide; note = VL of XENP022560

SEQ ID NO: 32923 - protein, 15 aa, synthetic construct
  source 1..15: note = Description of Artificial Sequence: Synthetic peptide; note = XENP022560 vlCDR1
RASQSVDYDGDSYMN

SEQ ID NO: 32924 - protein, 7 aa, synthetic construct
  source 1..7: note = Description of Artificial Sequence: Synthetic peptide; note = XENP022560 vlCDR2
AASELES

SEQ ID NO: 32925 - protein, 9 aa, synthetic construct
  source 1..9: note = Description of Artificial Sequence: Synthetic peptide; note = XENP022560 vlCDR3
QQSNEDPFT

SEQ ID NO: 32926 - protein, 450 aa, synthetic construct; identical to SEQ ID NO: 22504
  source 1..450: note = Description of Artificial Sequence: Synthetic polypeptide; note = XENP022561 7G8_H3.33_L1.11-one-arm Fab-Fc Heavy Chain

SEQ ID NO: 32927 - protein, 121 aa, synthetic construct; identical to SEQ ID NO: 22505
  source 1..121: note = Description of Artificial Sequence: Synthetic polypeptide; note = VH of XENP022561

SEQ ID NO: 32928 - protein, 5 aa, synthetic construct
  source 1..5: note = Description of Artificial Sequence: Synthetic peptide; note = XENP022561 vhCDR1
DAWMG

SEQ ID NO: 32929 - protein, 19 aa, synthetic construct
  source 1..19: note = Description of Artificial Sequence: Synthetic peptide; note = XENP022561 vhCDR2
EISTKANNHATYYAESVKG

SEQ ID NO: 32930 - protein, 10 aa, synthetic construct
  source 1..10: note = Description of Artificial Sequence: Synthetic peptide; note = XENP022561 vhCDR3
LATWDWYFDV

SEQ ID NO: 32931 - protein, 231 aa, synthetic construct; identical to SEQ ID NO: 32799
  source 1..231: note = Description of Artificial Sequence: Synthetic polypeptide; note = XENP022561 7G8_H3.33_L1.11-one-arm Fc-only Heavy Chain

SEQ ID NO: 32932 - protein, 218 aa, synthetic construct; identical to SEQ ID NO: 22359
  source 1..218: note = Description of Artificial Sequence: Synthetic polypeptide; note = XENP022561 7G8_H3.33_L1.11-one-arm Light Chain

SEQ ID NO: 32933 - protein, 111 aa, synthetic construct; identical to SEQ ID NO: 22360
  source 1..111: note = Description of Artificial Sequence: Synthetic polypeptide; note = VL of XENP022561

SEQ ID NO: 32934 - protein, 15 aa, synthetic construct
  source 1..15: note = Description of Artificial Sequence: Synthetic peptide; note = XENP022561 vlCDR1
RASQSVDYDGDSYMN

SEQ ID NO: 32935 - protein, 7 aa, synthetic construct
  source 1..7: note = Description of Artificial Sequence: Synthetic peptide; note = XENP022561 vlCDR2
AASELES

SEQ ID NO: 32936 - protein, 9 aa, synthetic construct
  source 1..9: note = Description of Artificial Sequence: Synthetic peptide; note = XENP022561 vlCDR3
QQSNEDPFT

SEQ ID NO: 32937 - protein, 450 aa, synthetic construct; identical to SEQ ID NO: 22324
  source 1..450: note = Description of Artificial Sequence: Synthetic polypeptide; note = XENP022562 7G8_H3.18_L1.30-one-arm Fab-Fc Heavy Chain

SEQ ID NO: 32938 - protein, 121 aa, synthetic construct; identical to SEQ ID NO: 22325
  source 1..121: note = Description of Artificial Sequence: Synthetic polypeptide; note = VH of XENP022562

SEQ ID NO: 32939 - protein, 5 aa, synthetic construct
  source 1..5: note = Description of Artificial Sequence: Synthetic peptide; note = XENP022562 vhCDR1
DAWMD

SEQ ID NO: 32940 - protein, 19 aa, synthetic construct
  source 1..19: note = Description of Artificial Sequence: Synthetic peptide; note = XENP022562 vhCDR2
EISTKANNHATYYAESVKG

SEQ ID NO: 32941 - protein, 10 aa, synthetic construct
  source 1..10: note = Description of Artificial Sequence: Synthetic peptide; note = XENP022562 vhCDR3
LATWDWYFDV

SEQ ID NO: 32942 - protein, 231 aa, synthetic construct; identical to SEQ ID NO: 32799
  source 1..231: note = Description of Artificial Sequence: Synthetic polypeptide; note = XENP022562 7G8_H3.18_L1.30_[Anti-LAG-3]_Fab-empty_Fc(216)_Ig G1_PVA_/S267K_pI(-)_Isosteric_A_L368D/K370S-IgG1_ISO(+RR)_C 220S /S364K/E357Q Heavy-scFv Chain

SEQ ID NO: 32943 - protein, 218 aa, synthetic construct; identical to SEQ ID NO: 22539
  source 1..218: note = Description of Artificial Sequence: Synthetic polypeptide; note = XENP022562 7G8_H3.18_L1.30-one-arm Light Chain

SEQ ID NO: 32944 - protein, 111 aa, synthetic construct; identical to SEQ ID NO: 22540
  source 1..111: note = Description of Artificial Sequence: Synthetic polypeptide; note = VL of XENP022562

SEQ ID NO: 32945 - protein, 15 aa, synthetic construct
  source 1..15: note = Description of Artificial Sequence: Synthetic peptide; note = XENP022562 vlCDR1
RASQSVDYDGDSYMN

SEQ ID NO: 32946 - protein, 7 aa, synthetic construct
  source 1..7: note = Description of Artificial Sequence: Synthetic peptide; note = XENP022562 vlCDR2
AASELES

SEQ ID NO: 32947 - protein, 9 aa, synthetic construct
  source 1..9: note = Description of Artificial Sequence: Synthetic peptide; note = XENP022562 vlCDR3
QQSNEDPFT

SEQ ID NO: 32948 - protein, 450 aa, synthetic construct; identical to SEQ ID NO: 22484
  source 1..450: note = Description of Artificial Sequence: Synthetic polypeptide; note = XENP022563 7G8_H3.30_L1.30-one-arm Fab-Fc Heavy Chain

SEQ ID NO: 32949 - protein, 121 aa, synthetic construct; identical to SEQ ID NO: 22485
  source 1..121: note = Description of Artificial Sequence: Synthetic polypeptide; note = VH of XENP022563

SEQ ID NO: 32950 - protein, 5 aa, synthetic construct
  source 1..5: note = Description of Artificial Sequence: Synthetic peptide; note = XENP022563 vhCDR1
DAWMS

SEQ ID NO: 32951 - protein, 19 aa, synthetic construct
  source 1..19: note = Description of Artificial Sequence: Synthetic peptide; note = XENP022563 vhCDR2
EISTKANNHATYYAESVKG

SEQ ID NO: 32952 - protein, 10 aa, synthetic construct
  source 1..10: note = Description of Artificial Sequence: Synthetic peptide; note = XENP022563 vhCDR3
LATWDWYFDV

SEQ ID NO: 32953 - protein, 231 aa, synthetic construct; identical to SEQ ID NO: 32799
  source 1..231: note = Description of Artificial Sequence: Synthetic polypeptide; note = XENP022563 7G8_H3.30_L1.30-one-arm Fc-only Heavy Chain

SEQ ID NO: 32954 - protein, 218 aa, synthetic construct; identical to SEQ ID NO: 22539
  source 1..218: note = Description of Artificial Sequence: Synthetic polypeptide; note = XENP022563 7G8_H3.30_L1.30-one-arm Light Chain

SEQ ID NO: 32955 - protein, 111 aa, synthetic construct; identical to SEQ ID NO: 22540
  source 1..111: note = Description of Artificial Sequence: Synthetic polypeptide; note = VL of XENP022563

SEQ ID NO: 32956 - protein, 15 aa, synthetic construct
  source 1..15: note = Description of Artificial Sequence: Synthetic peptide; note = XENP022563 vlCDR1
RASQSVDYDGDSYMN

SEQ ID NO: 32957 - protein, 7 aa, synthetic construct
  source 1..7: note = Description of Artificial Sequence: Synthetic peptide; note = XENP022563 vlCDR2
AASELES

SEQ ID NO: 32958 - protein, 9 aa, synthetic construct
  source 1..9: note = Description of Artificial Sequence: Synthetic peptide; note = XENP022563 vlCDR3
QQSNEDPFT

SEQ ID NO: 32959 - protein, 450 aa, synthetic construct; identical to SEQ ID NO: 22504
  source 1..450: note = Description of Artificial Sequence: Synthetic polypeptide; note = XENP022564 7G8_H3.33_L1.30-one-arm Fab-Fc Heavy Chain

SEQ ID NO: 32960 - protein, 121 aa, synthetic construct; identical to SEQ ID NO: 22505
  source 1..121: note = Description of Artificial Sequence: Synthetic polypeptide; note = VH of XENP022564

SEQ ID NO: 32961 - protein, 5 aa, synthetic construct
  source 1..5: note = Description of Artificial Sequence: Synthetic peptide; note = XENP022564 vhCDR1
DAWMG

SEQ ID NO: 32962 - protein, 19 aa, synthetic construct
  source 1..19: note = Description of Artificial Sequence: Synthetic peptide; note = XENP022564 vhCDR2
EISTKANNHATYYAESVKG

SEQ ID NO: 32963 - protein, 10 aa, synthetic construct
  source 1..10: note = Description of Artificial Sequence: Synthetic peptide; note = XENP022564 vhCDR3
LATWDWYFDV

SEQ ID NO: 32964 - protein, 231 aa, synthetic construct; identical to SEQ ID NO: 32799
  source 1..231: note = Description of Artificial Sequence: Synthetic polypeptide; note = XENP022564 7G8_H3.33_L1.30-one-arm Fc-only Heavy Chain

SEQ ID NO: 32965 - protein, 218 aa, synthetic construct; identical to SEQ ID NO: 22539
  source 1..218: note = Description of Artificial Sequence: Synthetic polypeptide; note = XENP022564 7G8_H3.33_L1.30-one-arm Light Chain

SEQ ID NO: 32966 - protein, 111 aa, synthetic construct; identical to SEQ ID NO: 22540
  source 1..111: note = Description of Artificial Sequence: Synthetic polypeptide; note = VL of XENP022564

SEQ ID NO: 32967 - protein, 15 aa, synthetic construct
  source 1..15: note = Description of Artificial Sequence: Synthetic peptide; note = XENP022564 vlCDR1
RASQSVDYDGDSYMN

SEQ ID NO: 32968 - protein, 7 aa, synthetic construct
  source 1..7: note = Description of Artificial Sequence: Synthetic peptide; note = XENP022564 vlCDR2
AASELES

SEQ ID NO: 32969 - protein, 9 aa, synthetic construct
  source 1..9: note = Description of Artificial Sequence: Synthetic peptide; note = XENP022564 vlCDR3
QQSNEDPFT

SEQ ID NO: 32970 - protein, 450 aa, synthetic construct; identical to SEQ ID NO: 22484
  source 1..450: note = Description of Artificial Sequence: Synthetic polypeptide; note = XENP022606 7G8_H3.30_L1.34-one-arm Fab-Fc Heavy Chain

SEQ ID NO: 32971 - protein, 121 aa, synthetic construct; identical to SEQ ID NO: 22485
  source 1..121: note = Description of Artificial Sequence: Synthetic polypeptide; note = VH of XENP022606

SEQ ID NO: 32972 - protein, 5 aa, synthetic construct
  source 1..5: note = Description of Artificial Sequence: Synthetic peptide; note = XENP022606 vhCDR1
DAWMS

SEQ ID NO: 32973 - protein, 19 aa, synthetic construct
  source 1..19: note = Description of Artificial Sequence: Synthetic peptide; note = XENP022606 vhCDR2
EISTKANNHATYYAESVKG

SEQ ID NO: 32974 - protein, 10 aa, synthetic construct
  source 1..10: note = Description of Artificial Sequence: Synthetic peptide; note = XENP022606 vhCDR3
LATWDWYFDV

SEQ ID NO: 32975 - protein, 231 aa, synthetic construct; identical to SEQ ID NO: 32799
  source 1..231: note = Description of Artificial Sequence: Synthetic polypeptide; note = XENP022606 7G8_H3.30_L1.34-one-arm Fc-only Heavy Chain

SEQ ID NO: 32976 - protein, 218 aa, synthetic construct; identical to SEQ ID NO: 22599
  source 1..218: note = Description of Artificial Sequence: Synthetic polypeptide; note = XENP022606 7G8_H3.30_L1.34-one-arm Light Chain

SEQ ID NO: 32977 - protein, 111 aa, synthetic construct; identical to SEQ ID NO: 22600
  source 1..111: note = Description of Artificial Sequence: Synthetic polypeptide; note = VL of XENP022606

SEQ ID NO: 32978 - protein, 15 aa, synthetic construct
  source 1..15: note = Description of Artificial Sequence: Synthetic peptide; note = XENP022606 vlCDR1
RASQSVDYDGDSYMN

SEQ ID NO: 32979 - protein, 7 aa, synthetic construct
  source 1..7: note = Description of Artificial Sequence: Synthetic peptide; note = XENP022606 vlCDR2
AASELES

SEQ ID NO: 32980 - protein, 9 aa, synthetic construct
  source 1..9: note = Description of Artificial Sequence: Synthetic peptide; note = XENP022606 vlCDR3
QQSNEDPFT

SEQ ID NO: 32981 - protein, 450 aa, synthetic construct; identical to SEQ ID NO: 22484
  source 1..450: note = Description of Artificial Sequence: Synthetic polypeptide; note = XENP022607 7G8_H3.30_L1.36-one-arm Fab-Fc Heavy Chain

SEQ ID NO: 32982 - protein, 121 aa, synthetic construct; identical to SEQ ID NO: 22485
  source 1..121: note = Description of Artificial Sequence: Synthetic polypeptide; note = VH of XENP022607

SEQ ID NO: 32983 - protein, 5 aa, synthetic construct
  source 1..5: note = Description of Artificial Sequence: Synthetic peptide; note = XENP022607 vhCDR1
DAWMS

SEQ ID NO: 32984 - protein, 19 aa, synthetic construct
  source 1..19: note = Description of Artificial Sequence: Synthetic peptide; note = XENP022607 vhCDR2
EISTKANNHATYYAESVKG

SEQ ID NO: 32985 - protein, 10 aa, synthetic construct
  source 1..10: note = Description of Artificial Sequence: Synthetic peptide; note = XENP022607 vhCDR3
LATWDWYFDV

SEQ ID NO: 32986 - protein, 231 aa, synthetic construct; identical to SEQ ID NO: 32799
  source 1..231: note = Description of Artificial Sequence: Synthetic polypeptide; note = XENP022607 7G8_H3.30_L1.36-one-arm Fc-only Heavy Chain

SEQ ID NO: 32987 - protein, 218 aa, synthetic construct; identical to SEQ ID NO: 22619
  source 1..218: note = Description of Artificial Sequence: Synthetic polypeptide; note = XENP022607 7G8_H3.30_L1.36-one-arm Light Chain

SEQ ID NO: 32988 - protein, 111 aa, synthetic construct; identical to SEQ ID NO: 22620
  source 1..111: note = Description of Artificial Sequence: Synthetic polypeptide; note = VL of XENP022607

SEQ ID NO: 32989 - protein, 15 aa, synthetic construct
  source 1..15: note = Description of Artificial Sequence: Synthetic peptide; note = XENP022607 vlCDR1
RASQSVDHDGDSYMN

SEQ ID NO: 32990 - protein, 7 aa, synthetic construct
  source 1..7: note = Description of Artificial Sequence: Synthetic peptide; note = XENP022607 vlCDR2
AASELES

SEQ ID NO: 32991 - protein, 9 aa, synthetic construct
  source 1..9: note = Description of Artificial Sequence: Synthetic peptide; note = XENP022607 vlCDR3
QQSNEDPFT

SEQ ID NO: 32992 - protein, 450 aa, synthetic construct; identical to SEQ ID NO: 22304
  source 1..450: note = Description of Artificial Sequence: Synthetic polypeptide; note = XENP022608 7G8_H3L1-one-arm Fab-Fc Heavy Chain

SEQ ID NO: 32993 - protein, 121 aa, synthetic construct; identical to SEQ ID NO: 17806
  source 1..121: note = Description of Artificial Sequence: Synthetic polypeptide; note = VH of XENP022608

SEQ ID NO: 32994 - protein, 5 aa, synthetic construct
  source 1..5: note = Description of Artificial Sequence: Synthetic peptide; note = XENP022608 vhCDR1
DAWMD

SEQ ID NO: 32995 - protein, 19 aa, synthetic construct
  source 1..19: note = Description of Artificial Sequence: Synthetic peptide; note = XENP022608 vhCDR2
EIRTKANNHATYYAESVKG

SEQ ID NO: 32996 - protein, 10 aa, synthetic construct
  source 1..10: note = Description of Artificial Sequence: Synthetic peptide; note = XENP022608 vhCDR3
LANWDWYFDV

SEQ ID NO: 32997 - protein, 231 aa, synthetic construct; identical to SEQ ID NO: 32799
  source 1..231: note = Description of Artificial Sequence: Synthetic polypeptide; note = XENP022608 7G8_H3L1-one-arm Fc-only Heavy Chain

SEQ ID NO: 32998 - protein, 218 aa, synthetic construct; identical to SEQ ID NO: 17600
  source 1..218: note = Description of Artificial Sequence: Synthetic polypeptide; note = XENP022608 7G8_H3L1-one-arm Light Chain

SEQ ID NO: 32999 - protein, 111 aa, synthetic construct; identical to SEQ ID NO: 17601
  source 1..111: note = Description of Artificial Sequence: Synthetic polypeptide; note = VL of XENP022608

SEQ ID NO: 33000 - protein, 15 aa, synthetic construct
  source 1..15: note = Description of Artificial Sequence: Synthetic peptide; note = XENP022608 vlCDR1
RASQSVDYDGDSYMN

SEQ ID NO: 33001 - protein, 7 aa, synthetic construct
  source 1..7: note = Description of Artificial Sequence: Synthetic peptide; note = XENP022608 vlCDR2
AASNLES

SEQ ID NO: 33002 - protein, 9 aa, synthetic construct
  source 1..9: note = Description of Artificial Sequence: Synthetic peptide; note = XENP022608 vlCDR3
QQSNEDPFT

SEQ ID NO: 33003 - protein, 222 aa, synthetic construct
  source 1..222: note = Description of Artificial Sequence: Synthetic polypeptide; note = XENP022721 1C11_H1L3_Fab Heavy Chain
QIQLVQSGAEVKKPGASVKVSCKASGYTFTHYGMNWVRQAPGQGLEWMGWINTYTGEPTYADKFQGRVTMTLDTSTSTAYMELSSLRSEDTAVYFCARDYYGSSPYWGQGTLVTVSSASTKGPSVFPLAPSSKSTSGGTAALGCLVKDYFPEPVTVSWNSGALTSGVHTFPAVLQSSGLYSLSSVVTVPSSSLGTQTYICNVNHKPSNTKVDKKVEPKSCGS

SEQ ID NO: 33004 - protein, 117 aa, synthetic construct
  source 1..117: note = Description of Artificial Sequence: Synthetic polypeptide; note = VH of XENP022721
QIQLVQSGAEVKKPGASVKVSCKASGYTFTHYGMNWVRQAPGQGLEWMGWINTYTGEPTYADKFQGRVTMTLDTSTSTAYMELSSLRSEDTAVYFCARDYYGSSPYWGQGTLVTVSS

SEQ ID NO: 33005 - protein, 5 aa, synthetic construct
  source 1..5: note = Description of Artificial Sequence: Synthetic peptide; note = XENP022721 vhCDR1
HYGMN

SEQ ID NO: 33006 - protein, 17 aa, synthetic construct
  source 1..17: note = Description of Artificial Sequence: Synthetic peptide; note = XENP022721 vhCDR2
WINTYTGEPTYADKFQG

SEQ ID NO: 33007 - protein, 8 aa, synthetic construct
  source 1..8: note = Description of Artificial Sequence: Synthetic peptide; note = XENP022721 vhCDR3
DYYGSSPY

SEQ ID NO: 33008 - protein, 219 aa, synthetic construct
  source 1..219: note = Description of Artificial Sequence: Synthetic polypeptide; note = XENP022721 1C11_H1L3_Fab Light Chain
DVLMTQSPDSLAVSLGERATINCKSSQSIVHSNGNTYLEWYQQKPGQSPKLLIYKVSNRFSGVPDRFSGSGSGTDFTLTISSLQAEDVAVYYCFQGSHVPNTFGGGTKVEIKRTVAAPSVFIFPPSDEQLKSGTASVVCLLNNFYPREAKVQWKVDNALQSGNSQESVTEQDSKDSTYSLSSTLTLSKADYEKHKVYACEVTHQGLSSPVTKSFNRGEC

SEQ ID NO: 33009 - protein, 112 aa, synthetic construct
  source 1..112: note = Description of Artificial Sequence: Synthetic polypeptide; note = VL of XENP022721
DVLMTQSPDSLAVSLGERATINCKSSQSIVHSNGNTYLEWYQQKPGQSPKLLIYKVSNRFSGVPDRFSGSGSGTDFTLTISSLQAEDVAVYYCFQGSHVPNTFGGGTKVEIK

SEQ ID NO: 33010 - protein, 16 aa, synthetic construct
  source 1..16: note = Description of Artificial Sequence: Synthetic peptide; note = XENP022721 vlCDR1
KSSQSIVHSNGNTYLE

SEQ ID NO: 33011 - protein, 7 aa, synthetic construct
  source 1..7: note = Description of Artificial Sequence: Synthetic peptide; note = XENP022721 vlCDR2
KVSNRFS

SEQ ID NO: 33012 - protein, 9 aa, synthetic construct
  source 1..9: note = Description of Artificial Sequence: Synthetic peptide; note = XENP022721 vlCDR3
FQGSHVPNT

SEQ ID NO: 33013 - protein, 222 aa, synthetic construct
  source 1..222: note = Description of Artificial Sequence: Synthetic polypeptide; note = XENP022722 1C11_H2L1_Fab Heavy Chain
EIQLLESGGGLVQPGGSLRLSCAASGYTFTHYGMNWVRQAPGKGLEWVSWINTYTGEPTYADSVKGRFTISLDTSKSTAYLQMNSLRAEDTAVYFCARDYYGSSPYWGQGTLVTVSSASTKGPSVFPLAPSSKSTSGGTAALGCLVKDYFPEPVTVSWNSGALTSGVHTFPAVLQSSGLYSLSSVVTVPSSSLGTQTYICNVNHKPSNTKVDKKVEPKSCGS

SEQ ID NO: 33014 - protein, 117 aa, synthetic construct
  source 1..117: note = Description of Artificial Sequence: Synthetic polypeptide; note = VH of XENP022722
EIQLLESGGGLVQPGGSLRLSCAASGYTFTHYGMNWVRQAPGKGLEWVSWINTYTGEPTYADSVKGRFTISLDTSKSTAYLQMNSLRAEDTAVYFCARDYYGSSPYWGQGTLVTVSS

SEQ ID NO: 33015 - protein, 5 aa, synthetic construct
  source 1..5: note = Description of Artificial Sequence: Synthetic peptide; note = XENP022722 vhCDR1
HYGMN

SEQ ID NO: 33016 - protein, 17 aa, synthetic construct
  source 1..17: note = Description of Artificial Sequence: Synthetic peptide; note = XENP022722 vhCDR2
WINTYTGEPTYADSVKG

SEQ ID NO: 33017 - protein, 8 aa, synthetic construct
  source 1..8: note = Description of Artificial Sequence: Synthetic peptide; note = XENP022722 vhCDR3
DYYGSSPY

SEQ ID NO: 33018 - protein, 219 aa, synthetic construct
  source 1..219: note = Description of Artificial Sequence: Synthetic polypeptide; note = XENP022722 1C11_H2L1_Fab Light Chain
DVLMTQSPLSLPVTPGEPASISCRSSQSIVHSNGNTYLEWYLQKPGQSPQLLIYKVSNRFSGVPDRFSGSGSGTDFTLKISRVEAEDVGVYYCFQGSHVPNTFGGGTKVEIKRTVAAPSVFIFPPSDEQLKSGTASVVCLLNNFYPREAKVQWKVDNALQSGNSQESVTEQDSKDSTYSLSSTLTLSKADYEKHKVYACEVTHQGLSSPVTKSFNRGEC

SEQ ID NO: 33019 - protein, 112 aa, synthetic construct
  source 1..112: note = Description of Artificial Sequence: Synthetic polypeptide; note = VL of XENP022722
DVLMTQSPLSLPVTPGEPASISCRSSQSIVHSNGNTYLEWYLQKPGQSPQLLIYKVSNRFSGVPDRFSGSGSGTDFTLKISRVEAEDVGVYYCFQGSHVPNTFGGGTKVEIK

SEQ ID NO: 33020 - protein, 16 aa, synthetic construct
  source 1..16: note = Description of Artificial Sequence: Synthetic peptide; note = XENP022722 vlCDR1
RSSQSIVHSNGNTYLE

SEQ ID NO: 33021 - protein, 7 aa, synthetic construct
  source 1..7: note = Description of Artificial Sequence: Synthetic peptide; note = XENP022722 vlCDR2
KVSNRFS

SEQ ID NO: 33022 - protein, 9 aa, synthetic construct
  source 1..9: note = Description of Artificial Sequence: Synthetic peptide; note = XENP022722 vlCDR3
FQGSHVPNT

SEQ ID NO: 33023 - protein, 222 aa, synthetic construct; identical to SEQ ID NO: 33013
  source 1..222: note = Description of Artificial Sequence: Synthetic polypeptide; note = XENP022723 1C11_H2L2_Fab Heavy Chain

SEQ ID NO: 33024 - protein, 117 aa, synthetic construct; identical to SEQ ID NO: 33014
  source 1..117: note = Description of Artificial Sequence: Synthetic polypeptide; note = VH of XENP022723

SEQ ID NO: 33025 - protein, 5 aa, synthetic construct
  source 1..5: note = Description of Artificial Sequence: Synthetic peptide; note = XENP022723 vhCDR1
HYGMN

SEQ ID NO: 33026 - protein, 17 aa, synthetic construct
  source 1..17: note = Description of Artificial Sequence: Synthetic peptide; note = XENP022723 vhCDR2
WINTYTGEPTYADSVKG

SEQ ID NO: 33027 - protein, 8 aa, synthetic construct
  source 1..8: note = Description of Artificial Sequence: Synthetic peptide; note = XENP022723 vhCDR3
DYYGSSPY

SEQ ID NO: 33028 - protein, 219 aa, synthetic construct
  source 1..219: note = Description of Artificial Sequence: Synthetic polypeptide; note = XENP022723 1C11_H2L2_Fab Light Chain
DVLMTQSPLSLPVTLGQPASISCRSSQSIVHSNGNTYLEWYQQRPGQSPRLLIYKVSNRFSGVPDRFSGSGSGTDFTLKISRVEAEDVGVYYCFQGSHVPNTFGGGTKVEIKRTVAAPSVFIFPPSDEQLKSGTASVVCLLNNFYPREAKVQWKVDNALQSGNSQESVTEQDSKDSTYSLSSTLTLSKADYEKHKVYACEVTHQGLSSPVTKSFNRGEC

SEQ ID NO: 33029 - protein, 112 aa, synthetic construct
  source 1..112: note = Description of Artificial Sequence: Synthetic polypeptide; note = VL of XENP022723
DVLMTQSPLSLPVTLGQPASISCRSSQSIVHSNGNTYLEWYQQRPGQSPRLLIYKVSNRFSGVPDRFSGSGSGTDFTLKISRVEAEDVGVYYCFQGSHVPNTFGGGTKVEIK

SEQ ID NO: 33030 - protein, 16 aa, synthetic construct
  source 1..16: note = Description of Artificial Sequence: Synthetic peptide; note = XENP022723 vlCDR1
RSSQSIVHSNGNTYLE

SEQ ID NO: 33031 - protein, 7 aa, synthetic construct
  source 1..7: note = Description of Artificial Sequence: Synthetic peptide; note = XENP022723 vlCDR2
KVSNRFS

SEQ ID NO: 33032 - protein, 9 aa, synthetic construct
  source 1..9: note = Description of Artificial Sequence: Synthetic peptide; note = XENP022723 vlCDR3
FQGSHVPNT

SEQ ID NO: 33033 - protein, 222 aa, synthetic construct
  source 1..222: note = Description of Artificial Sequence: Synthetic polypeptide; note = XENP022724 1C11_H3L3_Fab Heavy Chain
QIQLVQSGSELKKPGASVKVSCKASGYTFTHYGMNWVRQAPGQGLEWMGWINTYTGEPTYADGFTGRFVFSLDTSVSTAYLQISSLKAEDTAVYFCARDYYGSSPYWGQGTLVTVSSASTKGPSVFPLAPSSKSTSGGTAALGCLVKDYFPEPVTVSWNSGALTSGVHTFPAVLQSSGLYSLSSVVTVPSSSLGTQTYICNVNHKPSNTKVDKKVEPKSCGS

SEQ ID NO: 33034 - protein, 117 aa, synthetic construct
  source 1..117: note = Description of Artificial Sequence: Synthetic polypeptide; note = VH of XENP022724
QIQLVQSGSELKKPGASVKVSCKASGYTFTHYGMNWVRQAPGQGLEWMGWINTYTGEPTYADGFTGRFVFSLDTSVSTAYLQISSLKAEDTAVYFCARDYYGSSPYWGQGTLVTVSS

SEQ ID NO: 33035 - protein, 5 aa, synthetic construct
  source 1..5: note = Description of Artificial Sequence: Synthetic peptide; note = XENP022724 vhCDR1
HYGMN

SEQ ID NO: 33036 - protein, 17 aa, synthetic construct
  source 1..17: note = Description of Artificial Sequence: Synthetic peptide; note = XENP022724 vhCDR2
WINTYTGEPTYADGFTG

SEQ ID NO: 33037 - protein, 8 aa, synthetic construct
  source 1..8: note = Description of Artificial Sequence: Synthetic peptide; note = XENP022724 vhCDR3
DYYGSSPY

SEQ ID NO: 33038 - protein, 219 aa, synthetic construct; identical to SEQ ID NO: 33008
  source 1..219: note = Description of Artificial Sequence: Synthetic polypeptide; note = XENP022724 1C11_H3L3_Fab Light Chain

SEQ ID NO: 33039 - protein, 112 aa, synthetic construct; identical to SEQ ID NO: 33009
  source 1..112: note = Description of Artificial Sequence: Synthetic polypeptide; note = VL of XENP022724

SEQ ID NO: 33040 - protein, 16 aa, synthetic construct
  source 1..16: note = Description of Artificial Sequence: Synthetic peptide; note = XENP022724 vlCDR1
KSSQSIVHSNGNTYLE

SEQ ID NO: 33041 - protein, 7 aa, synthetic construct
  source 1..7: note = Description of Artificial Sequence: Synthetic peptide; note = XENP022724 vlCDR2
KVSNRFS

SEQ ID NO: 33042 - protein, 9 aa, synthetic construct
  source 1..9: note = Description of Artificial Sequence: Synthetic peptide; note = XENP022724 vlCDR3
FQGSHVPNT

SEQ ID NO: 33043 - protein, 222 aa, synthetic construct
  source 1..222: note = Description of Artificial Sequence: Synthetic polypeptide; note = XENP022725 1C11_H0L0_Fab Heavy Chain
QIQLVQSGPELKKPGETVKISCRASGYTFTHYGMNWVKQAPGKGLKWMGWINTYTGEPTYADDFKGRFAFSLETSASTAYLQINNLKNEDTATYFCARDYYGSSPYWGQGTTLTVSSASTKGPSVFPLAPSSKSTSGGTAALGCLVKDYFPEPVTVSWNSGALTSGVHTFPAVLQSSGLYSLSSVVTVPSSSLGTQTYICNVNHKPSNTKVDKKVEPKSCGS

SEQ ID NO: 33044 - protein, 117 aa, synthetic construct
  source 1..117: note = Description of Artificial Sequence: Synthetic polypeptide; note = VH of XENP022725
QIQLVQSGPELKKPGETVKISCRASGYTFTHYGMNWVKQAPGKGLKWMGWINTYTGEPTYADDFKGRFAFSLETSASTAYLQINNLKNEDTATYFCARDYYGSSPYWGQGTTLTVSS

SEQ ID NO: 33045 - protein, 5 aa, synthetic construct
  source 1..5: note = Description of Artificial Sequence: Synthetic peptide; note = XENP022725 vhCDR1
HYGMN

SEQ ID NO: 33046 - protein, 17 aa, synthetic construct
  source 1..17: note = Description of Artificial Sequence: Synthetic peptide; note = XENP022725 vhCDR2
WINTYTGEPTYADDFKG

SEQ ID NO: 33047 - protein, 8 aa, synthetic construct
  source 1..8: note = Description of Artificial Sequence: Synthetic peptide; note = XENP022725 vhCDR3
DYYGSSPY

SEQ ID NO: 33048 - protein, 219 aa, synthetic construct
  source 1..219: note = Description of Artificial Sequence: Synthetic polypeptide; note = XENP022725 1C11_H0L0_Fab Light Chain
DVLMTQTPLSLPVSLGDQASISCRSSQSIVHSNGNTYLEWYLQKPGQSPKLLIYKVSNRFSGVPDRFSGSGSGTDFTLKISRVEAEDLGVYYCFQGSHVPNTFGGGTKLEIKRTVAAPSVFIFPPSDEQLKSGTASVVCLLNNFYPREAKVQWKVDNALQSGNSQESVTEQDSKDSTYSLSSTLTLSKADYEKHKVYACEVTHQGLSSPVTKSFNRGEC

SEQ ID NO: 33049 - protein, 112 aa, synthetic construct
  source 1..112: note = Description of Artificial Sequence: Synthetic polypeptide; note = VL of XENP022725
DVLMTQTPLSLPVSLGDQASISCRSSQSIVHSNGNTYLEWYLQKPGQSPKLLIYKVSNRFSGVPDRFSGSGSGTDFTLKISRVEAEDLGVYYCFQGSHVPNTFGGGTKLEIK

SEQ ID NO: 33050 - protein, 16 aa, synthetic construct
  source 1..16: note = Description of Artificial Sequence: Synthetic peptide; note = XENP022725 vlCDR1
RSSQSIVHSNGNTYLE

SEQ ID NO: 33051 - protein, 7 aa, synthetic construct
  source 1..7: note = Description of Artificial Sequence: Synthetic peptide; note = XENP022725 vlCDR2
KVSNRFS

SEQ ID NO: 33052 - protein, 9 aa, synthetic construct
  source 1..9: note = Description of Artificial Sequence: Synthetic peptide; note = XENP022725 vlCDR3
FQGSHVPNT

SEQ ID NO: 33053 - protein, 222 aa, synthetic construct; identical to SEQ ID NO: 33033
  source 1..222: note = Description of Artificial Sequence: Synthetic polypeptide; note = XENP022991 1C11_H3L1_Fab Heavy Chain

SEQ ID NO: 33054 - protein, 117 aa, synthetic construct; identical to SEQ ID NO: 33034
  source 1..117: note = Description of Artificial Sequence: Synthetic polypeptide; note = VH of XENP022991

SEQ ID NO: 33055 - protein, 5 aa, synthetic construct
  source 1..5: note = Description of Artificial Sequence: Synthetic peptide; note = XENP022991 vhCDR1
HYGMN

SEQ ID NO: 33056 - protein, 17 aa, synthetic construct
  source 1..17: note = Description of Artificial Sequence: Synthetic peptide; note = XENP022991 vhCDR2
WINTYTGEPTYADGFTG

SEQ ID NO: 33057 - protein, 8 aa, synthetic construct
  source 1..8: note = Description of Artificial Sequence: Synthetic peptide; note = XENP022991 vhCDR3
DYYGSSPY

SEQ ID NO: 33058 - protein, 219 aa, synthetic construct; identical to SEQ ID NO: 33018
  source 1..219: note = Description of Artificial Sequence: Synthetic polypeptide; note = XENP022991 1C11_H3L1_Fab Light Chain

SEQ ID NO: 33059 - protein, 112 aa, synthetic construct; identical to SEQ ID NO: 33019
  source 1..112: note = Description of Artificial Sequence: Synthetic polypeptide; note = VL of XENP022991

SEQ ID NO: 33060 - protein, 16 aa, synthetic construct
  source 1..16: note = Description of Artificial Sequence: Synthetic peptide; note = XENP022991 vlCDR1
RSSQSIVHSNGNTYLE

SEQ ID NO: 33061 - protein, 7 aa, synthetic construct
  source 1..7: note = Description of Artificial Sequence: Synthetic peptide; note = XENP022991 vlCDR2
KVSNRFS

SEQ ID NO: 33062 - protein, 9 aa, synthetic construct
  source 1..9: note = Description of Artificial Sequence: Synthetic peptide; note = XENP022991 vlCDR3
FQGSHVPNT

SEQ ID NO: 33063 - protein, 222 aa, synthetic construct; identical to SEQ ID NO: 33033
  source 1..222: note = Description of Artificial Sequence: Synthetic polypeptide; note = XENP022992 1C11_H3L2_Fab Heavy Chain

SEQ ID NO: 33064 - protein, 117 aa, synthetic construct; identical to SEQ ID NO: 33034
  source 1..117: note = Description of Artificial Sequence: Synthetic polypeptide; note = VH of XENP022992

SEQ ID NO: 33065 - protein, 5 aa, synthetic construct
  source 1..5: note = Description of Artificial Sequence: Synthetic peptide; note = XENP022992 vhCDR1
HYGMN

SEQ ID NO: 33066 - protein, 17 aa, synthetic construct
  source 1..17: note = Description of Artificial Sequence: Synthetic peptide; note = XENP022992 vhCDR2
WINTYTGEPTYADGFTG

SEQ ID NO: 33067 - protein, 8 aa, synthetic construct
  source 1..8: note = Description of Artificial Sequence: Synthetic peptide; note = XENP022992 vhCDR3
DYYGSSPY

SEQ ID NO: 33068 - protein, 219 aa, synthetic construct; identical to SEQ ID NO: 33028
  source 1..219: note = Description of Artificial Sequence: Synthetic polypeptide; note = XENP022992 1C11_H3L2_Fab Light Chain

SEQ ID NO: 33069 - protein, 112 aa, synthetic construct; identical to SEQ ID NO: 33029
  source 1..112: note = Description of Artificial Sequence: Synthetic polypeptide; note = VL of XENP022992

SEQ ID NO: 33070 - protein, 16 aa, synthetic construct
  source 1..16: note = Description of Artificial Sequence: Synthetic peptide; note = XENP022992 vlCDR1
RSSQSIVHSNGNTYLE

SEQ ID NO: 33071 - protein, 7 aa, synthetic construct
  source 1..7: note = Description of Artificial Sequence: Synthetic peptide; note = XENP022992 vlCDR2
KVSNRFS

SEQ ID NO: 33072 - protein, 9 aa, synthetic construct
  source 1..9: note = Description of Artificial Sequence: Synthetic peptide; note = XENP022992 vlCDR3
FQGSHVPNT

SEQ ID NO: 33073 - protein, 251 aa, synthetic construct
  source 1..251: note = Description of Artificial Sequence: Synthetic polypeptide; note = XENP023574 1C11_L1H3_scFv
DVLMTQSPLSLPVTPGEPASISCRSSQSIVHSNGNTYLEWYLQKPGQSPQLLIYKVSNRFSGVPDRFSGSGSGTDFTLKISRVEAEDVGVYYCFQGSHVPNTFGGGTKVEIKGKPGSGKPGSGKPGSGKPGSQIQLVQSGSELKKPGASVKVSCKASGYTFTHYGMNWVRQAPGQGLEWMGWINTYTGEPTYADGFTGRFVFSLDTSVSTAYLQISSLKAEDTAVYFCARDYYGSSPYWGQGTLVTVSSGS

SEQ ID NO: 33074 - protein, 112 aa, synthetic construct; identical to SEQ ID NO: 33019
  source 1..112: note = Description of Artificial Sequence: Synthetic polypeptide; note = VH of XENP023574

SEQ ID NO: 33075 - protein, 119 aa, synthetic construct
  source 1..119: note = Description of Artificial Sequence: Synthetic polypeptide; note = VL of XENP023574
QIQLVQSGSELKKPGASVKVSCKASGYTFTHYGMNWVRQAPGQGLEWMGWINTYTGEPTYADGFTGRFVFSLDTSVSTAYLQISSLKAEDTAVYFCARDYYGSSPYWGQGTLVTVSSGS

SEQ ID NO: 33076 - protein, 16 aa, synthetic construct
  source 1..16: note = Description of Artificial Sequence: Synthetic peptide; note = XENP023574 vhCDR1
RSSQSIVHSNGNTYLE

SEQ ID NO: 33077 - protein, 7 aa, synthetic construct
  source 1..7: note = Description of Artificial Sequence: Synthetic peptide; note = XENP023574 vhCDR2
KVSNRFS

SEQ ID NO: 33078 - protein, 9 aa, synthetic construct
  source 1..9: note = Description of Artificial Sequence: Synthetic peptide; note = XENP023574 vhCDR3
FQGSHVPNT

SEQ ID NO: 33079 - protein, 5 aa, synthetic construct
  source 1..5: note = Description of Artificial Sequence: Synthetic peptide; note = XENP023574 vlCDR1
HYGMN

SEQ ID NO: 33080 - protein, 17 aa, synthetic construct
  source 1..17: note = Description of Artificial Sequence: Synthetic peptide; note = XENP023574 vlCDR2
WINTYTGEPTYADGFTG

SEQ ID NO: 33081 - protein, 8 aa, synthetic construct
  source 1..8: note = Description of Artificial Sequence: Synthetic peptide; note = XENP023574 vlCDR3
DYYGSSPY

SEQ ID NO: 33082 - protein, 251 aa, synthetic construct
  source 1..251: note = Description of Artificial Sequence: Synthetic polypeptide; note = XENP023575 1C11_L2H3_scFv
DVLMTQSPLSLPVTLGQPASISCRSSQSIVHSNGNTYLEWYQQRPGQSPRLLIYKVSNRFSGVPDRFSGSGSGTDFTLKISRVEAEDVGVYYCFQGSHVPNTFGGGTKVEIKGKPGSGKPGSGKPGSGKPGSQIQLVQSGSELKKPGASVKVSCKASGYTFTHYGMNWVRQAPGQGLEWMGWINTYTGEPTYADGFTGRFVFSLDTSVSTAYLQISSLKAEDTAVYFCARDYYGSSPYWGQGTLVTVSSGS

SEQ ID NO: 33083 - protein, 112 aa, synthetic construct; identical to SEQ ID NO: 33029
  source 1..112: note = Description of Artificial Sequence: Synthetic polypeptide; note = VH of XENP023575

SEQ ID NO: 33084 - protein, 119 aa, synthetic construct; identical to SEQ ID NO: 33075
  source 1..119: note = Description of Artificial Sequence: Synthetic polypeptide; note = VL of XENP023575

SEQ ID NO: 33085 - protein, 16 aa, synthetic construct
  source 1..16: note = Description of Artificial Sequence: Synthetic peptide; note = XENP023575 vhCDR1
RSSQSIVHSNGNTYLE

SEQ ID NO: 33086 - protein, 7 aa, synthetic construct
  source 1..7: note = Description of Artificial Sequence: Synthetic peptide; note = XENP023575 vhCDR2
KVSNRFS

SEQ ID NO: 33087 - protein, 9 aa, synthetic construct
  source 1..9: note = Description of Artificial Sequence: Synthetic peptide; note = XENP023575 vhCDR3
FQGSHVPNT

SEQ ID NO: 33088 - protein, 5 aa, synthetic construct
  source 1..5: note = Description of Artificial Sequence: Synthetic peptide; note = XENP023575 vlCDR1
HYGMN

SEQ ID NO: 33089 - protein, 17 aa, synthetic construct
  source 1..17: note = Description of Artificial Sequence: Synthetic peptide; note = XENP023575 vlCDR2
WINTYTGEPTYADGFTG

SEQ ID NO: 33090 - protein, 8 aa, synthetic construct
  source 1..8: note = Description of Artificial Sequence: Synthetic peptide; note = XENP023575 vlCDR3
DYYGSSPY

SEQ ID NO: 33091 - protein, 251 aa, synthetic construct
  source 1..251: note = Description of Artificial Sequence: Synthetic polypeptide; note = XENP023576 1C11_L3H3_scFv
DVLMTQSPDSLAVSLGERATINCKSSQSIVHSNGNTYLEWYQQKPGQSPKLLIYKVSNRFSGVPDRFSGSGSGTDFTLTISSLQAEDVAVYYCFQGSHVPNTFGGGTKVEIKGKPGSGKPGSGKPGSGKPGSQIQLVQSGSELKKPGASVKVSCKASGYTFTHYGMNWVRQAPGQGLEWMGWINTYTGEPTYADGFTGRFVFSLDTSVSTAYLQISSLKAEDTAVYFCARDYYGSSPYWGQGTLVTVSSGS

SEQ ID NO: 33092 - protein, 112 aa, synthetic construct; identical to SEQ ID NO: 33009
  source 1..112: note = Description of Artificial Sequence: Synthetic polypeptide; note = VH of XENP023576

SEQ ID NO: 33093 - protein, 119 aa, synthetic construct; identical to SEQ ID NO: 33075
  source 1..119: note = Description of Artificial Sequence: Synthetic polypeptide; note = VL of XENP023576

SEQ ID NO: 33094 - protein, 16 aa, synthetic construct
  source 1..16: note = Description of Artificial Sequence: Synthetic peptide; note = XENP023576 vhCDR1
KSSQSIVHSNGNTYLE

SEQ ID NO: 33095 - protein, 7 aa, synthetic construct
  source 1..7: note = Description of Artificial Sequence: Synthetic peptide; note = XENP023576 vhCDR2
KVSNRFS

SEQ ID NO: 33096 - protein, 9 aa, synthetic construct
  source 1..9: note = Description of Artificial Sequence: Synthetic peptide; note = XENP023576 vhCDR3
FQGSHVPNT

SEQ ID NO: 33097 - protein, 5 aa, synthetic construct
  source 1..5: note = Description of Artificial Sequence: Synthetic peptide; note = XENP023576 vlCDR1
HYGMN

SEQ ID NO: 33098 - protein, 17 aa, synthetic construct
  source 1..17: note = Description of Artificial Sequence: Synthetic peptide; note = XENP023576 vlCDR2
WINTYTGEPTYADGFTG

SEQ ID NO: 33099 - protein, 8 aa, synthetic construct
  source 1..8: note = Description of Artificial Sequence: Synthetic peptide; note = XENP023576 vlCDR3
DYYGSSPY

SEQ ID NO: 33100 - protein, 251 aa, synthetic construct
  source 1..251: note = Description of Artificial Sequence: Synthetic polypeptide; note = XENP023577 1C11_H3_L3.1_scFv
QIQLVQSGSELKKPGASVKVSCKASGYTFTHYGMNWVRQAPGQGLEWMGWINTYTGEPTYADGFTGRFVFSLDTSVSTAYLQISSLKAEDTAVYFCARDYYGSSPYWGQGTLVTVSSGKPGSGKPGSGKPGSGKPGSDILMTQSPDSLAVSLGERATINCKSSQSIVHSNGNTYLEWYQQKPGQSPKLLIYKVSNRFSGVPDRFSGSGSGTDFTLTISSLQAEDVAVYYCFQGSHVPNTFGGGTKVEIKGS

SEQ ID NO: 33101 - protein, 117 aa, synthetic construct; identical to SEQ ID NO: 33034
  source 1..117: note = Description of Artificial Sequence: Synthetic polypeptide; note = VH of XENP023577

SEQ ID NO: 33102 - protein, 114 aa, synthetic construct
  source 1..114: note = Description of Artificial Sequence: Synthetic polypeptide; note = VL of XENP023577
DILMTQSPDSLAVSLGERATINCKSSQSIVHSNGNTYLEWYQQKPGQSPKLLIYKVSNRFSGVPDRFSGSGSGTDFTLTISSLQAEDVAVYYCFQGSHVPNTFGGGTKVEIKGS

SEQ ID NO: 33103 - protein, 5 aa, synthetic construct
  source 1..5: note = Description of Artificial Sequence: Synthetic peptide; note = XENP023577 vhCDR1
HYGMN

SEQ ID NO: 33104 - protein, 17 aa, synthetic construct
  source 1..17: note = Description of Artificial Sequence: Synthetic peptide; note = XENP023577 vhCDR2
WINTYTGEPTYADGFTG

SEQ ID NO: 33105 - protein, 8 aa, synthetic construct
  source 1..8: note = Description of Artificial Sequence: Synthetic peptide; note = XENP023577 vhCDR3
DYYGSSPY

SEQ ID NO: 33106 - protein, 16 aa, synthetic construct
  source 1..16: note = Description of Artificial Sequence: Synthetic peptide; note = XENP023577 vlCDR1
KSSQSIVHSNGNTYLE

SEQ ID NO: 33107 - protein, 7 aa, synthetic construct
  source 1..7: note = Description of Artificial Sequence: Synthetic peptide; note = XENP023577 vlCDR2
KVSNRFS

SEQ ID NO: 33108 - protein, 9 aa, synthetic construct
  source 1..9: note = Description of Artificial Sequence: Synthetic peptide; note = XENP023577 vlCDR3
FQGSHVPNT

SEQ ID NO: 33109 - protein, 251 aa, synthetic construct
  source 1..251: note = Description of Artificial Sequence: Synthetic polypeptide; note = XENP023578 1C11_H3_L3.2_scFv
QIQLVQSGSELKKPGASVKVSCKASGYTFTHYGMNWVRQAPGQGLEWMGWINTYTGEPTYADGFTGRFVFSLDTSVSTAYLQISSLKAEDTAVYFCARDYYGSSPYWGQGTLVTVSSGKPGSGKPGSGKPGSGKPGSDLLMTQSPDSLAVSLGERATINCKSSQSIVHSNGNTYLEWYQQKPGQSPKLLIYKVSNRFSGVPDRFSGSGSGTDFTLTISSLQAEDVAVYYCFQGSHVPNTFGGGTKVEIKGS

SEQ ID NO: 33110 - protein, 117 aa, synthetic construct; identical to SEQ ID NO: 33034
  source 1..117: note = Description of Artificial Sequence: Synthetic polypeptide; note = VH of XENP023578

SEQ ID NO: 33111 - protein, 114 aa, synthetic construct
  source 1..114: note = Description of Artificial Sequence: Synthetic polypeptide; note = VL of XENP023578
DLLMTQSPDSLAVSLGERATINCKSSQSIVHSNGNTYLEWYQQKPGQSPKLLIYKVSNRFSGVPDRFSGSGSGTDFTLTISSLQAEDVAVYYCFQGSHVPNTFGGGTKVEIKGS

SEQ ID NO: 33112 - protein, 5 aa, synthetic construct
  source 1..5: note = Description of Artificial Sequence: Synthetic peptide; note = XENP023578 vhCDR1
HYGMN

SEQ ID NO: 33113 - protein, 17 aa, synthetic construct
  source 1..17: note = Description of Artificial Sequence: Synthetic peptide; note = XENP023578 vhCDR2
WINTYTGEPTYADGFTG

SEQ ID NO: 33114 - protein, 8 aa, synthetic construct
  source 1..8: note = Description of Artificial Sequence: Synthetic peptide; note = XENP023578 vhCDR3
DYYGSSPY

SEQ ID NO: 33115 - protein, 16 aa, synthetic construct
  source 1..16: note = Description of Artificial Sequence: Synthetic peptide; note = XENP023578 vlCDR1
KSSQSIVHSNGNTYLE

SEQ ID NO: 33116 - protein, 7 aa, synthetic construct
  source 1..7: note = Description of Artificial Sequence: Synthetic peptide; note = XENP023578 vlCDR2
KVSNRFS

SEQ ID NO: 33117 - protein, 9 aa, synthetic construct
  source 1..9: note = Description of Artificial Sequence: Synthetic peptide; note = XENP023578 vlCDR3
FQGSHVPNT

SEQ ID NO: 33118 - protein, 251 aa, synthetic construct
  source 1..251: note = Description of Artificial Sequence: Synthetic polypeptide; note = XENP023579 1C11_H3_L3.3_scFv
QIQLVQSGSELKKPGASVKVSCKASGYTFTHYGMNWVRQAPGQGLEWMGWINTYTGEPTYADGFTGRFVFSLDTSVSTAYLQISSLKAEDTAVYFCARDYYGSSPYWGQGTLVTVSSGKPGSGKPGSGKPGSGKPGSDVVMTQSPDSLAVSLGERATINCKSSQSIVHSNGNTYLEWYQQKPGQSPKLLIYKVSNRFSGVPDRFSGSGSGTDFTLTISSLQAEDVAVYYCFQGSHVPNTFGGGTKVEIKGS

SEQ ID NO: 33119 - protein, 117 aa, synthetic construct; identical to SEQ ID NO: 33034
  source 1..117: note = Description of Artificial Sequence: Synthetic polypeptide; note = VH of XENP023579

SEQ ID NO: 33120 - protein, 114 aa, synthetic construct
  source 1..114: note = Description of Artificial Sequence: Synthetic polypeptide; note = VL of XENP023579
DVVMTQSPDSLAVSLGERATINCKSSQSIVHSNGNTYLEWYQQKPGQSPKLLIYKVSNRFSGVPDRFSGSGSGTDFTLTISSLQAEDVAVYYCFQGSHVPNTFGGGTKVEIKGS

SEQ ID NO: 33121 - protein, 5 aa, synthetic construct
  source 1..5: note = Description of Artificial Sequence: Synthetic peptide; note = XENP023579 vhCDR1
HYGMN

SEQ ID NO: 33122 - protein, 17 aa, synthetic construct
  source 1..17: note = Description of Artificial Sequence: Synthetic peptide; note = XENP023579 vhCDR2
WINTYTGEPTYADGFTG

SEQ ID NO: 33123 - protein, 8 aa, synthetic construct
  source 1..8: note = Description of Artificial Sequence: Synthetic peptide; note = XENP023579 vhCDR3
DYYGSSPY

SEQ ID NO: 33124 - protein, 16 aa, synthetic construct
  source 1..16: note = Description of Artificial Sequence: Synthetic peptide; note = XENP023579 vlCDR1
KSSQSIVHSNGNTYLE

SEQ ID NO: 33125 - protein, 7 aa, synthetic construct
  source 1..7: note = Description of Artificial Sequence: Synthetic peptide; note = XENP023579 vlCDR2
KVSNRFS

SEQ ID NO: 33126 - protein, 9 aa, synthetic construct
  source 1..9: note = Description of Artificial Sequence: Synthetic peptide; note = XENP023579 vlCDR3
FQGSHVPNT

SEQ ID NO: 33127 - protein, 251 aa, synthetic construct
  source 1..251: note = Description of Artificial Sequence: Synthetic polypeptide; note = XENP023580 1C11_H3_L3.4_scFv
QIQLVQSGSELKKPGASVKVSCKASGYTFTHYGMNWVRQAPGQGLEWMGWINTYTGEPTYADGFTGRFVFSLDTSVSTAYLQISSLKAEDTAVYFCARDYYGSSPYWGQGTLVTVSSGKPGSGKPGSGKPGSGKPGSDVEMTQSPDSLAVSLGERATINCKSSQSIVHSNGNTYLEWYQQKPGQSPKLLIYKVSNRFSGVPDRFSGSGSGTDFTLTISSLQAEDVAVYYCFQGSHVPNTFGGGTKVEIKGS

SEQ ID NO: 33128 - protein, 117 aa, synthetic construct; identical to SEQ ID NO: 33034
  source 1..117: note = Description of Artificial Sequence: Synthetic polypeptide; note = VH of XENP023580

SEQ ID NO: 33129 - protein, 114 aa, synthetic construct
  source 1..114: note = Description of Artificial Sequence: Synthetic polypeptide; note = VL of XENP023580
DVEMTQSPDSLAVSLGERATINCKSSQSIVHSNGNTYLEWYQQKPGQSPKLLIYKVSNRFSGVPDRFSGSGSGTDFTLTISSLQAEDVAVYYCFQGSHVPNTFGGGTKVEIKGS

SEQ ID NO: 33130 - protein, 5 aa, synthetic construct
  source 1..5: note = Description of Artificial Sequence: Synthetic peptide; note = XENP023580 vhCDR1
HYGMN

SEQ ID NO: 33131 - protein, 17 aa, synthetic construct
  source 1..17: note = Description of Artificial Sequence: Synthetic peptide; note = XENP023580 vhCDR2
WINTYTGEPTYADGFTG

SEQ ID NO: 33132 - protein, 8 aa, synthetic construct
  source 1..8: note = Description of Artificial Sequence: Synthetic peptide; note = XENP023580 vhCDR3
DYYGSSPY

SEQ ID NO: 33133 - protein, 16 aa, synthetic construct
  source 1..16: note = Description of Artificial Sequence: Synthetic peptide; note = XENP023580 vlCDR1
KSSQSIVHSNGNTYLE

SEQ ID NO: 33134 - protein, 7 aa, synthetic construct
  source 1..7: note = Description of Artificial Sequence: Synthetic peptide; note = XENP023580 vlCDR2
KVSNRFS

SEQ ID NO: 33135 - protein, 9 aa, synthetic construct
  source 1..9: note = Description of Artificial Sequence: Synthetic peptide; note = XENP023580 vlCDR3
FQGSHVPNT

SEQ ID NO: 33136 - protein, 251 aa, synthetic construct
  source 1..251: note = Description of Artificial Sequence: Synthetic polypeptide; note = XENP023581 1C11_H3_L3.5_scFv
QIQLVQSGSELKKPGASVKVSCKASGYTFTHYGMNWVRQAPGQGLEWMGWINTYTGEPTYADGFTGRFVFSLDTSVSTAYLQISSLKAEDTAVYFCARDYYGSSPYWGQGTLVTVSSGKPGSGKPGSGKPGSGKPGSDVQMTQSPDSLAVSLGERATINCKSSQSIVHSNGNTYLEWYQQKPGQSPKLLIYKVSNRFSGVPDRFSGSGSGTDFTLTISSLQAEDVAVYYCFQGSHVPNTFGGGTKVEIKGS

SEQ ID NO: 33137 - protein, 117 aa, synthetic construct; identical to SEQ ID NO: 33034
  source 1..117: note = Description of Artificial Sequence: Synthetic polypeptide; note = VH of XENP023581

SEQ ID NO: 33138 - protein, 114 aa, synthetic construct
  source 1..114: note = Description of Artificial Sequence: Synthetic polypeptide; note = VL of XENP023581
DVQMTQSPDSLAVSLGERATINCKSSQSIVHSNGNTYLEWYQQKPGQSPKLLIYKVSNRFSGVPDRFSGSGSGTDFTLTISSLQAEDVAVYYCFQGSHVPNTFGGGTKVEIKGS

SEQ ID NO: 33139 - protein, 5 aa, synthetic construct
  source 1..5: note = Description of Artificial Sequence: Synthetic peptide; note = XENP023581 vhCDR1
HYGMN

SEQ ID NO: 33140 - protein, 17 aa, synthetic construct
  source 1..17: note = Description of Artificial Sequence: Synthetic peptide; note = XENP023581 vhCDR2
WINTYTGEPTYADGFTG

SEQ ID NO: 33141 - protein, 8 aa, synthetic construct
  source 1..8: note = Description of Artificial Sequence: Synthetic peptide; note = XENP023581 vhCDR3
DYYGSSPY

SEQ ID NO: 33142 - protein, 16 aa, synthetic construct
  source 1..16: note = Description of Artificial Sequence: Synthetic peptide; note = XENP023581 vlCDR1
KSSQSIVHSNGNTYLE

SEQ ID NO: 33143 - protein, 7 aa, synthetic construct
  source 1..7: note = Description of Artificial Sequence: Synthetic peptide; note = XENP023581 vlCDR2
KVSNRFS

SEQ ID NO: 33144 - protein, 9 aa, synthetic construct
  source 1..9: note = Description of Artificial Sequence: Synthetic peptide; note = XENP023581 vlCDR3
FQGSHVPNT

SEQ ID NO: 33145 - protein, 251 aa, synthetic construct
  source 1..251: note = Description of Artificial Sequence: Synthetic polypeptide; note = XENP023582 1C11_H3_L3.6_scFv
QIQLVQSGSELKKPGASVKVSCKASGYTFTHYGMNWVRQAPGQGLEWMGWINTYTGEPTYADGFTGRFVFSLDTSVSTAYLQISSLKAEDTAVYFCARDYYGSSPYWGQGTLVTVSSGKPGSGKPGSGKPGSGKPGSDVDMTQSPDSLAVSLGERATINCKSSQSIVHSNGNTYLEWYQQKPGQSPKLLIYKVSNRFSGVPDRFSGSGSGTDFTLTISSLQAEDVAVYYCFQGSHVPNTFGGGTKVEIKGS

SEQ ID NO: 33146 - protein, 117 aa, synthetic construct; identical to SEQ ID NO: 33034
  source 1..117: note = Description of Artificial Sequence: Synthetic polypeptide; note = VH of XENP023582

SEQ ID NO: 33147 - protein, 114 aa, synthetic construct
  source 1..114: note = Description of Artificial Sequence: Synthetic polypeptide; note = VL of XENP023582
DVDMTQSPDSLAVSLGERATINCKSSQSIVHSNGNTYLEWYQQKPGQSPKLLIYKVSNRFSGVPDRFSGSGSGTDFTLTISSLQAEDVAVYYCFQGSHVPNTFGGGTKVEIKGS

SEQ ID NO: 33148 - protein, 5 aa, synthetic construct
  source 1..5: note = Description of Artificial Sequence: Synthetic peptide; note = XENP023582 vhCDR1
HYGMN

SEQ ID NO: 33149 - protein, 17 aa, synthetic construct
  source 1..17: note = Description of Artificial Sequence: Synthetic peptide; note = XENP023582 vhCDR2
WINTYTGEPTYADGFTG

SEQ ID NO: 33150 - protein, 8 aa, synthetic construct
  source 1..8: note = Description of Artificial Sequence: Synthetic peptide; note = XENP023582 vhCDR3
DYYGSSPY

SEQ ID NO: 33151 - protein, 16 aa, synthetic construct
  source 1..16: note = Description of Artificial Sequence: Synthetic peptide; note = XENP023582 vlCDR1
KSSQSIVHSNGNTYLE

SEQ ID NO: 33152 - protein, 7 aa, synthetic construct
  source 1..7: note = Description of Artificial Sequence: Synthetic peptide; note = XENP023582 vlCDR2
KVSNRFS

SEQ ID NO: 33153 - protein, 9 aa, synthetic construct
  source 1..9: note = Description of Artificial Sequence: Synthetic peptide; note = XENP023582 vlCDR3
FQGSHVPNT

SEQ ID NO: 33154 - protein, 251 aa, synthetic construct
  source 1..251: note = Description of Artificial Sequence: Synthetic polypeptide; note = XENP023583 1C11_H3_L3.7_scFv
QIQLVQSGSELKKPGASVKVSCKASGYTFTHYGMNWVRQAPGQGLEWMGWINTYTGEPTYADGFTGRFVFSLDTSVSTAYLQISSLKAEDTAVYFCARDYYGSSPYWGQGTLVTVSSGKPGSGKPGSGKPGSGKPGSDIQMTQSPDSLAVSLGERATINCKSSQSIVHSNGNTYLEWYQQKPGQSPKLLIYKVSNRFSGVPDRFSGSGSGTDFTLTISSLQAEDVAVYYCFQGSHVPNTFGGGTKVEIKGS

SEQ ID NO: 33155 - protein, 117 aa, synthetic construct; identical to SEQ ID NO: 33034
  source 1..117: note = Description of Artificial Sequence: Synthetic polypeptide; note = VH of XENP023583

SEQ ID NO: 33156 - protein, 114 aa, synthetic construct
  source 1..114: note = Description of Artificial Sequence: Synthetic polypeptide; note = VL of XENP023583
DIQMTQSPDSLAVSLGERATINCKSSQSIVHSNGNTYLEWYQQKPGQSPKLLIYKVSNRFSGVPDRFSGSGSGTDFTLTISSLQAEDVAVYYCFQGSHVPNTFGGGTKVEIKGS

SEQ ID NO: 33157 - protein, 5 aa, synthetic construct
  source 1..5: note = Description of Artificial Sequence: Synthetic peptide; note = XENP023583 vhCDR1
HYGMN

SEQ ID NO: 33158 - protein, 17 aa, synthetic construct
  source 1..17: note = Description of Artificial Sequence: Synthetic peptide; note = XENP023583 vhCDR2
WINTYTGEPTYADGFTG

SEQ ID NO: 33159 - protein, 8 aa, synthetic construct
  source 1..8: note = Description of Artificial Sequence: Synthetic peptide; note = XENP023583 vhCDR3
DYYGSSPY

SEQ ID NO: 33160 - protein, 16 aa, synthetic construct
  source 1..16: note = Description of Artificial Sequence: Synthetic peptide; note = XENP023583 vlCDR1
KSSQSIVHSNGNTYLE

SEQ ID NO: 33161 - protein, 7 aa, synthetic construct
  source 1..7: note = Description of Artificial Sequence: Synthetic peptide; note = XENP023583 vlCDR2
KVSNRFS

SEQ ID NO: 33162 - protein, 9 aa, synthetic construct
  source 1..9: note = Description of Artificial Sequence: Synthetic peptide; note = XENP023583 vlCDR3
FQGSHVPNT

SEQ ID NO: 33163 - protein, 251 aa, synthetic construct
  source 1..251: note = Description of Artificial Sequence: Synthetic polypeptide; note = XENP023584 1C11_H3_L3.9_scFv
QIQLVQSGSELKKPGASVKVSCKASGYTFTHYGMNWVRQAPGQGLEWMGWINTYTGEPTYADGFTGRFVFSLDTSVSTAYLQISSLKAEDTAVYFCARDYYGSSPYWGQGTLVTVSSGKPGSGKPGSGKPGSGKPGSDVLMTQSPKSLAVSLGERATINCKSSQSIVHSNGNTYLEWYQQKPGQSPKLLIYKVSNRFSGVPDRFSGSGSGTDFTLTISSLQAEDVAVYYCFQGSHVPNTFGGGTKVEIKGS

SEQ ID NO: 33164 - protein, 117 aa, synthetic construct; identical to SEQ ID NO: 33034
  source 1..117: note = Description of Artificial Sequence: Synthetic polypeptide; note = VH of XENP023584

SEQ ID NO: 33165 - protein, 114 aa, synthetic construct
  source 1..114: note = Description of Artificial Sequence: Synthetic polypeptide; note = VL of XENP023584
DVLMTQSPKSLAVSLGERATINCKSSQSIVHSNGNTYLEWYQQKPGQSPKLLIYKVSNRFSGVPDRFSGSGSGTDFTLTISSLQAEDVAVYYCFQGSHVPNTFGGGTKVEIKGS

SEQ ID NO: 33166 - protein, 5 aa, synthetic construct
  source 1..5: note = Description of Artificial Sequence: Synthetic peptide; note = XENP023584 vhCDR1
HYGMN

SEQ ID NO: 33167 - protein, 17 aa, synthetic construct
  source 1..17: note = Description of Artificial Sequence: Synthetic peptide; note = XENP023584 vhCDR2
WINTYTGEPTYADGFTG

SEQ ID NO: 33168 - protein, 8 aa, synthetic construct
  source 1..8: note = Description of Artificial Sequence: Synthetic peptide; note = XENP023584 vhCDR3
DYYGSSPY

SEQ ID NO: 33169 - protein, 16 aa, synthetic construct
  source 1..16: note = Description of Artificial Sequence: Synthetic peptide; note = XENP023584 vlCDR1
KSSQSIVHSNGNTYLE

SEQ ID NO: 33170 - protein, 7 aa, synthetic construct
  source 1..7: note = Description of Artificial Sequence: Synthetic peptide; note = XENP023584 vlCDR2
KVSNRFS

SEQ ID NO: 33171 - protein, 9 aa, synthetic construct
  source 1..9: note = Description of Artificial Sequence: Synthetic peptide; note = XENP023584 vlCDR3
FQGSHVPNT

SEQ ID NO: 33172 - protein, 251 aa, synthetic construct
  source 1..251: note = Description of Artificial Sequence: Synthetic polypeptide; note = XENP023585 1C11_H3_L3.10_scFv
QIQLVQSGSELKKPGASVKVSCKASGYTFTHYGMNWVRQAPGQGLEWMGWINTYTGEPTYADGFTGRFVFSLDTSVSTAYLQISSLKAEDTAVYFCARDYYGSSPYWGQGTLVTVSSGKPGSGKPGSGKPGSGKPGSDVLMTQSPLSLAVSLGERATINCKSSQSIVHSNGNTYLEWYQQKPGQSPKLLIYKVSNRFSGVPDRFSGSGSGTDFTLTISSLQAEDVAVYYCFQGSHVPNTFGGGTKVEIKGS

SEQ ID NO: 33173 - protein, 117 aa, synthetic construct; identical to SEQ ID NO: 33034
  source 1..117: note = Description of Artificial Sequence: Synthetic polypeptide; note = VH of XENP023585

SEQ ID NO: 33174 - protein, 114 aa, synthetic construct
  source 1..114: note = Description of Artificial Sequence: Synthetic polypeptide; note = VL of XENP023585
DVLMTQSPLSLAVSLGERATINCKSSQSIVHSNGNTYLEWYQQKPGQSPKLLIYKVSNRFSGVPDRFSGSGSGTDFTLTISSLQAEDVAVYYCFQGSHVPNTFGGGTKVEIKGS

SEQ ID NO: 33175 - protein, 5 aa, synthetic construct
  source 1..5: note = Description of Artificial Sequence: Synthetic peptide; note = XENP023585 vhCDR1
HYGMN

SEQ ID NO: 33176 - protein, 17 aa, synthetic construct
  source 1..17: note = Description of Artificial Sequence: Synthetic peptide; note = XENP023585 vhCDR2
WINTYTGEPTYADGFTG

SEQ ID NO: 33177 - protein, 8 aa, synthetic construct
  source 1..8: note = Description of Artificial Sequence: Synthetic peptide; note = XENP023585 vhCDR3
DYYGSSPY

SEQ ID NO: 33178 - protein, 16 aa, synthetic construct
  source 1..16: note = Description of Artificial Sequence: Synthetic peptide; note = XENP023585 vlCDR1
KSSQSIVHSNGNTYLE

SEQ ID NO: 33179 - protein, 7 aa, synthetic construct
  source 1..7: note = Description of Artificial Sequence: Synthetic peptide; note = XENP023585 vlCDR2
KVSNRFS

SEQ ID NO: 33180 - protein, 9 aa, synthetic construct
  source 1..9: note = Description of Artificial Sequence: Synthetic peptide; note = XENP023585 vlCDR3
FQGSHVPNT

SEQ ID NO: 33181 - protein, 251 aa, synthetic construct
  source 1..251: note = Description of Artificial Sequence: Synthetic polypeptide; note = XENP023586 1C11_H3_L3.11_scFv
QIQLVQSGSELKKPGASVKVSCKASGYTFTHYGMNWVRQAPGQGLEWMGWINTYTGEPTYADGFTGRFVFSLDTSVSTAYLQISSLKAEDTAVYFCARDYYGSSPYWGQGTLVTVSSGKPGSGKPGSGKPGSGKPGSDVLMTQSPSSLAVSLGERATINCKSSQSIVHSNGNTYLEWYQQKPGQSPKLLIYKVSNRFSGVPDRFSGSGSGTDFTLTISSLQAEDVAVYYCFQGSHVPNTFGGGTKVEIKGS

SEQ ID NO: 33182 - protein, 117 aa, synthetic construct; identical to SEQ ID NO: 33034
  source 1..117: note = Description of Artificial Sequence: Synthetic polypeptide; note = VH of XENP023586

SEQ ID NO: 33183 - protein, 114 aa, synthetic construct
  source 1..114: note = Description of Artificial Sequence: Synthetic polypeptide; note = VL of XENP023586
DVLMTQSPSSLAVSLGERATINCKSSQSIVHSNGNTYLEWYQQKPGQSPKLLIYKVSNRFSGVPDRFSGSGSGTDFTLTISSLQAEDVAVYYCFQGSHVPNTFGGGTKVEIKGS

SEQ ID NO: 33184 - protein, 5 aa, synthetic construct
  source 1..5: note = Description of Artificial Sequence: Synthetic peptide; note = XENP023586 vhCDR1
HYGMN

SEQ ID NO: 33185 - protein, 17 aa, synthetic construct
  source 1..17: note = Description of Artificial Sequence: Synthetic peptide; note = XENP023586 vhCDR2
WINTYTGEPTYADGFTG

SEQ ID NO: 33186 - protein, 8 aa, synthetic construct
  source 1..8: note = Description of Artificial Sequence: Synthetic peptide; note = XENP023586 vhCDR3
DYYGSSPY

SEQ ID NO: 33187 - protein, 16 aa, synthetic construct
  source 1..16: note = Description of Artificial Sequence: Synthetic peptide; note = XENP023586 vlCDR1
KSSQSIVHSNGNTYLE

SEQ ID NO: 33188 - protein, 7 aa, synthetic construct
  source 1..7: note = Description of Artificial Sequence: Synthetic peptide; note = XENP023586 vlCDR2
KVSNRFS

SEQ ID NO: 33189 - protein, 9 aa, synthetic construct
  source 1..9: note = Description of Artificial Sequence: Synthetic peptide; note = XENP023586 vlCDR3
FQGSHVPNT

SEQ ID NO: 33190 - protein, 251 aa, synthetic construct
  source 1..251: note = Description of Artificial Sequence: Synthetic polypeptide; note = XENP023587 1C11_H3_L3.12_scFv
QIQLVQSGSELKKPGASVKVSCKASGYTFTHYGMNWVRQAPGQGLEWMGWINTYTGEPTYADGFTGRFVFSLDTSVSTAYLQISSLKAEDTAVYFCARDYYGSSPYWGQGTLVTVSSGKPGSGKPGSGKPGSGKPGSDVLMTQSPGSLAVSLGERATINCKSSQSIVHSNGNTYLEWYQQKPGQSPKLLIYKVSNRFSGVPDRFSGSGSGTDFTLTISSLQAEDVAVYYCFQGSHVPNTFGGGTKVEIKGS

SEQ ID NO: 33191 - protein, 117 aa, synthetic construct; identical to SEQ ID NO: 33034
  source 1..117: note = Description of Artificial Sequence: Synthetic polypeptide; note = VH of XENP023587

SEQ ID NO: 33192 - protein, 114 aa, synthetic construct
  source 1..114: note = Description of Artificial Sequence: Synthetic polypeptide; note = VL of XENP023587
DVLMTQSPGSLAVSLGERATINCKSSQSIVHSNGNTYLEWYQQKPGQSPKLLIYKVSNRFSGVPDRFSGSGSGTDFTLTISSLQAEDVAVYYCFQGSHVPNTFGGGTKVEIKGS

SEQ ID NO: 33193 - protein, 5 aa, synthetic construct
  source 1..5: note = Description of Artificial Sequence: Synthetic peptide; note = XENP023587 vhCDR1
HYGMN

SEQ ID NO: 33194 - protein, 17 aa, synthetic construct
  source 1..17: note = Description of Artificial Sequence: Synthetic peptide; note = XENP023587 vhCDR2
WINTYTGEPTYADGFTG

SEQ ID NO: 33195 - protein, 8 aa, synthetic construct
  source 1..8: note = Description of Artificial Sequence: Synthetic peptide; note = XENP023587 vhCDR3
DYYGSSPY

SEQ ID NO: 33196 - protein, 16 aa, synthetic construct
  source 1..16: note = Description of Artificial Sequence: Synthetic peptide; note = XENP023587 vlCDR1
KSSQSIVHSNGNTYLE

SEQ ID NO: 33197 - protein, 7 aa, synthetic construct
  source 1..7: note = Description of Artificial Sequence: Synthetic peptide; note = XENP023587 vlCDR2
KVSNRFS

SEQ ID NO: 33198 - protein, 9 aa, synthetic construct
  source 1..9: note = Description of Artificial Sequence: Synthetic peptide; note = XENP023587 vlCDR3
FQGSHVPNT

SEQ ID NO: 33199 - protein, 251 aa, synthetic construct
  source 1..251: note = Description of Artificial Sequence: Synthetic polypeptide; note = XENP023588 1C11_H3_L3.14_scFv
QIQLVQSGSELKKPGASVKVSCKASGYTFTHYGMNWVRQAPGQGLEWMGWINTYTGEPTYADGFTGRFVFSLDTSVSTAYLQISSLKAEDTAVYFCARDYYGSSPYWGQGTLVTVSSGKPGSGKPGSGKPGSGKPGSDVLMTQSPDSLPVSLGERATINCKSSQSIVHSNGNTYLEWYQQKPGQSPKLLIYKVSNRFSGVPDRFSGSGSGTDFTLTISSLQAEDVAVYYCFQGSHVPNTFGGGTKVEIKGS

SEQ ID NO: 33200 - protein, 117 aa, synthetic construct; identical to SEQ ID NO: 33034
  source 1..117: note = Description of Artificial Sequence: Synthetic polypeptide; note = VH of XENP023588

SEQ ID NO: 33201 - protein, 114 aa, synthetic construct
  source 1..114: note = Description of Artificial Sequence: Synthetic polypeptide; note = VL of XENP023588
DVLMTQSPDSLPVSLGERATINCKSSQSIVHSNGNTYLEWYQQKPGQSPKLLIYKVSNRFSGVPDRFSGSGSGTDFTLTISSLQAEDVAVYYCFQGSHVPNTFGGGTKVEIKGS

SEQ ID NO: 33202 - protein, 5 aa, synthetic construct
  source 1..5: note = Description of Artificial Sequence: Synthetic peptide; note = XENP023588 vhCDR1
HYGMN

SEQ ID NO: 33203 - protein, 17 aa, synthetic construct
  source 1..17: note = Description of Artificial Sequence: Synthetic peptide; note = XENP023588 vhCDR2
WINTYTGEPTYADGFTG

SEQ ID NO: 33204 - protein, 8 aa, synthetic construct
  source 1..8: note = Description of Artificial Sequence: Synthetic peptide; note = XENP023588 vhCDR3
DYYGSSPY

SEQ ID NO: 33205 - protein, 16 aa, synthetic construct
  source 1..16: note = Description of Artificial Sequence: Synthetic peptide; note = XENP023588 vlCDR1
KSSQSIVHSNGNTYLE

SEQ ID NO: 33206 - protein, 7 aa, synthetic construct
  source 1..7: note = Description of Artificial Sequence: Synthetic peptide; note = XENP023588 vlCDR2
KVSNRFS

SEQ ID NO: 33207 - protein, 9 aa, synthetic construct
  source 1..9: note = Description of Artificial Sequence: Synthetic peptide; note = XENP023588 vlCDR3
FQGSHVPNT

SEQ ID NO: 33208 - protein, 251 aa, synthetic construct
  source 1..251: note = Description of Artificial Sequence: Synthetic polypeptide; note = XENP023589 1C11_H3_L3.15_scFv
QIQLVQSGSELKKPGASVKVSCKASGYTFTHYGMNWVRQAPGQGLEWMGWINTYTGEPTYADGFTGRFVFSLDTSVSTAYLQISSLKAEDTAVYFCARDYYGSSPYWGQGTLVTVSSGKPGSGKPGSGKPGSGKPGSDVLMTQSPDSLSVSLGERATINCKSSQSIVHSNGNTYLEWYQQKPGQSPKLLIYKVSNRFSGVPDRFSGSGSGTDFTLTISSLQAEDVAVYYCFQGSHVPNTFGGGTKVEIKGS

SEQ ID NO: 33209 - protein, 117 aa, synthetic construct; identical to SEQ ID NO: 33034
  source 1..117: note = Description of Artificial Sequence: Synthetic polypeptide; note = VH of XENP023589

SEQ ID NO: 33210 - protein, 114 aa, synthetic construct
  source 1..114: note = Description of Artificial Sequence: Synthetic polypeptide; note = VL of XENP023589
DVLMTQSPDSLSVSLGERATINCKSSQSIVHSNGNTYLEWYQQKPGQSPKLLIYKVSNRFSGVPDRFSGSGSGTDFTLTISSLQAEDVAVYYCFQGSHVPNTFGGGTKVEIKGS

SEQ ID NO: 33211 - protein, 5 aa, synthetic construct
  source 1..5: note = Description of Artificial Sequence: Synthetic peptide; note = XENP023589 vhCDR1
HYGMN

SEQ ID NO: 33212 - protein, 17 aa, synthetic construct
  source 1..17: note = Description of Artificial Sequence: Synthetic peptide; note = XENP023589 vhCDR2
WINTYTGEPTYADGFTG

SEQ ID NO: 33213 - protein, 8 aa, synthetic construct
  source 1..8: note = Description of Artificial Sequence: Synthetic peptide; note = XENP023589 vhCDR3
DYYGSSPY

SEQ ID NO: 33214 - protein, 16 aa, synthetic construct
  source 1..16: note = Description of Artificial Sequence: Synthetic peptide; note = XENP023589 vlCDR1
KSSQSIVHSNGNTYLE

SEQ ID NO: 33215 - protein, 7 aa, synthetic construct
  source 1..7: note = Description of Artificial Sequence: Synthetic peptide; note = XENP023589 vlCDR2
KVSNRFS

SEQ ID NO: 33216 - protein, 9 aa, synthetic construct
  source 1..9: note = Description of Artificial Sequence: Synthetic peptide; note = XENP023589 vlCDR3
FQGSHVPNT

SEQ ID NO: 33217 - protein, 251 aa, synthetic construct
  source 1..251: note = Description of Artificial Sequence: Synthetic polypeptide; note = XENP023590 1C11_H3_L3.16_scFv
QIQLVQSGSELKKPGASVKVSCKASGYTFTHYGMNWVRQAPGQGLEWMGWINTYTGEPTYADGFTGRFVFSLDTSVSTAYLQISSLKAEDTAVYFCARDYYGSSPYWGQGTLVTVSSGKPGSGKPGSGKPGSGKPGSDVLMTQSPDSLTVSLGERATINCKSSQSIVHSNGNTYLEWYQQKPGQSPKLLIYKVSNRFSGVPDRFSGSGSGTDFTLTISSLQAEDVAVYYCFQGSHVPNTFGGGTKVEIKGS

SEQ ID NO: 33218 - protein, 117 aa, synthetic construct; identical to SEQ ID NO: 33034
  source 1..117: note = Description of Artificial Sequence: Synthetic polypeptide; note = VH of XENP023590

SEQ ID NO: 33219 - protein, 114 aa, synthetic construct
  source 1..114: note = Description of Artificial Sequence: Synthetic polypeptide; note = VL of XENP023590
DVLMTQSPDSLTVSLGERATINCKSSQSIVHSNGNTYLEWYQQKPGQSPKLLIYKVSNRFSGVPDRFSGSGSGTDFTLTISSLQAEDVAVYYCFQGSHVPNTFGGGTKVEIKGS

SEQ ID NO: 33220 - protein, 5 aa, synthetic construct
  source 1..5: note = Description of Artificial Sequence: Synthetic peptide; note = XENP023590 vhCDR1
HYGMN

SEQ ID NO: 33221 - protein, 17 aa, synthetic construct
  source 1..17: note = Description of Artificial Sequence: Synthetic peptide; note = XENP023590 vhCDR2
WINTYTGEPTYADGFTG

SEQ ID NO: 33222 - protein, 8 aa, synthetic construct
  source 1..8: note = Description of Artificial Sequence: Synthetic peptide; note = XENP023590 vhCDR3
DYYGSSPY

SEQ ID NO: 33223 - protein, 16 aa, synthetic construct
  source 1..16: note = Description of Artificial Sequence: Synthetic peptide; note = XENP023590 vlCDR1
KSSQSIVHSNGNTYLE

SEQ ID NO: 33224 - protein, 7 aa, synthetic construct
  source 1..7: note = Description of Artificial Sequence: Synthetic peptide; note = XENP023590 vlCDR2
KVSNRFS

SEQ ID NO: 33225 - protein, 9 aa, synthetic construct
  source 1..9: note = Description of Artificial Sequence: Synthetic peptide; note = XENP023590 vlCDR3
FQGSHVPNT

SEQ ID NO: 33226 - protein, 251 aa, synthetic construct
  source 1..251: note = Description of Artificial Sequence: Synthetic polypeptide; note = XENP023591 1C11_H3_L3.17_scFv
QIQLVQSGSELKKPGASVKVSCKASGYTFTHYGMNWVRQAPGQGLEWMGWINTYTGEPTYADGFTGRFVFSLDTSVSTAYLQISSLKAEDTAVYFCARDYYGSSPYWGQGTLVTVSSGKPGSGKPGSGKPGSGKPGSDVLMTQSPDSLSASVGERATINCKSSQSIVHSNGNTYLEWYQQKPGQSPKLLIYKVSNRFSGVPDRFSGSGSGTDFTLTISSLQAEDVAVYYCFQGSHVPNTFGGGTKVEIKGS

SEQ ID NO: 33227 - protein, 117 aa, synthetic construct; identical to SEQ ID NO: 33034
  source 1..117: note = Description of Artificial Sequence: Synthetic polypeptide; note = VH of XENP023591

SEQ ID NO: 33228 - protein, 114 aa, synthetic construct
  source 1..114: note = Description of Artificial Sequence: Synthetic polypeptide; note = VL of XENP023591
DVLMTQSPDSLSASVGERATINCKSSQSIVHSNGNTYLEWYQQKPGQSPKLLIYKVSNRFSGVPDRFSGSGSGTDFTLTISSLQAEDVAVYYCFQGSHVPNTFGGGTKVEIKGS

SEQ ID NO: 33229 - protein, 5 aa, synthetic construct
  source 1..5: note = Description of Artificial Sequence: Synthetic peptide; note = XENP023591 vhCDR1
HYGMN

SEQ ID NO: 33230 - protein, 17 aa, synthetic construct
  source 1..17: note = Description of Artificial Sequence: Synthetic peptide; note = XENP023591 vhCDR2
WINTYTGEPTYADGFTG

SEQ ID NO: 33231 - protein, 8 aa, synthetic construct
  source 1..8: note = Description of Artificial Sequence: Synthetic peptide; note = XENP023591 vhCDR3
DYYGSSPY

SEQ ID NO: 33232 - protein, 16 aa, synthetic construct
  source 1..16: note = Description of Artificial Sequence: Synthetic peptide; note = XENP023591 vlCDR1
KSSQSIVHSNGNTYLE

SEQ ID NO: 33233 - protein, 7 aa, synthetic construct
  source 1..7: note = Description of Artificial Sequence: Synthetic peptide; note = XENP023591 vlCDR2
KVSNRFS

SEQ ID NO: 33234 - protein, 9 aa, synthetic construct
  source 1..9: note = Description of Artificial Sequence: Synthetic peptide; note = XENP023591 vlCDR3
FQGSHVPNT

SEQ ID NO: 33235 - protein, 251 aa, synthetic construct
  source 1..251: note = Description of Artificial Sequence: Synthetic polypeptide; note = XENP023592 1C11_H3_L3.18_scFv
QIQLVQSGSELKKPGASVKVSCKASGYTFTHYGMNWVRQAPGQGLEWMGWINTYTGEPTYADGFTGRFVFSLDTSVSTAYLQISSLKAEDTAVYFCARDYYGSSPYWGQGTLVTVSSGKPGSGKPGSGKPGSGKPGSDVLMTQSPDSLSVSPGERATINCKSSQSIVHSNGNTYLEWYQQKPGQSPKLLIYKVSNRFSGVPDRFSGSGSGTDFTLTISSLQAEDVAVYYCFQGSHVPNTFGGGTKVEIKGS

SEQ ID NO: 33236 - protein, 117 aa, synthetic construct; identical to SEQ ID NO: 33034
  source 1..117: note = Description of Artificial Sequence: Synthetic polypeptide; note = VH of XENP023592

SEQ ID NO: 33237 - protein, 114 aa, synthetic construct
  source 1..114: note = Description of Artificial Sequence: Synthetic polypeptide; note = VL of XENP023592
DVLMTQSPDSLSVSPGERATINCKSSQSIVHSNGNTYLEWYQQKPGQSPKLLIYKVSNRFSGVPDRFSGSGSGTDFTLTISSLQAEDVAVYYCFQGSHVPNTFGGGTKVEIKGS

SEQ ID NO: 33238 - protein, 5 aa, synthetic construct
  source 1..5: note = Description of Artificial Sequence: Synthetic peptide; note = XENP023592 vhCDR1
HYGMN

SEQ ID NO: 33239 - protein, 17 aa, synthetic construct
  source 1..17: note = Description of Artificial Sequence: Synthetic peptide; note = XENP023592 vhCDR2
WINTYTGEPTYADGFTG

SEQ ID NO: 33240 - protein, 8 aa, synthetic construct
  source 1..8: note = Description of Artificial Sequence: Synthetic peptide; note = XENP023592 vhCDR3
DYYGSSPY

SEQ ID NO: 33241 - protein, 16 aa, synthetic construct
  source 1..16: note = Description of Artificial Sequence: Synthetic peptide; note = XENP023592 vlCDR1
KSSQSIVHSNGNTYLE

SEQ ID NO: 33242 - protein, 7 aa, synthetic construct
  source 1..7: note = Description of Artificial Sequence: Synthetic peptide; note = XENP023592 vlCDR2
KVSNRFS

SEQ ID NO: 33243 - protein, 9 aa, synthetic construct
  source 1..9: note = Description of Artificial Sequence: Synthetic peptide; note = XENP023592 vlCDR3
FQGSHVPNT

SEQ ID NO: 33244 - protein, 251 aa, synthetic construct
  source 1..251: note = Description of Artificial Sequence: Synthetic polypeptide; note = XENP023593 1C11_H3_L3.19_scFv
QIQLVQSGSELKKPGASVKVSCKASGYTFTHYGMNWVRQAPGQGLEWMGWINTYTGEPTYADGFTGRFVFSLDTSVSTAYLQISSLKAEDTAVYFCARDYYGSSPYWGQGTLVTVSSGKPGSGKPGSGKPGSGKPGSDVLMTQSPDSLSLSPGERATINCKSSQSIVHSNGNTYLEWYQQKPGQSPKLLIYKVSNRFSGVPDRFSGSGSGTDFTLTISSLQAEDVAVYYCFQGSHVPNTFGGGTKVEIKGS

SEQ ID NO: 33245 - protein, 117 aa, synthetic construct; identical to SEQ ID NO: 33034
  source 1..117: note = Description of Artificial Sequence: Synthetic polypeptide; note = VH of XENP023593

SEQ ID NO: 33246 - protein, 114 aa, synthetic construct
  source 1..114: note = Description of Artificial Sequence: Synthetic polypeptide; note = VL of XENP023593
DVLMTQSPDSLSLSPGERATINCKSSQSIVHSNGNTYLEWYQQKPGQSPKLLIYKVSNRFSGVPDRFSGSGSGTDFTLTISSLQAEDVAVYYCFQGSHVPNTFGGGTKVEIKGS

SEQ ID NO: 33247 - protein, 5 aa, synthetic construct
  source 1..5: note = Description of Artificial Sequence: Synthetic peptide; note = XENP023593 vhCDR1
HYGMN

SEQ ID NO: 33248 - protein, 17 aa, synthetic construct
  source 1..17: note = Description of Artificial Sequence: Synthetic peptide; note = XENP023593 vhCDR2
WINTYTGEPTYADGFTG

SEQ ID NO: 33249 - protein, 8 aa, synthetic construct
  source 1..8: note = Description of Artificial Sequence: Synthetic peptide; note = XENP023593 vhCDR3
DYYGSSPY

SEQ ID NO: 33250 - protein, 16 aa, synthetic construct
  source 1..16: note = Description of Artificial Sequence: Synthetic peptide; note = XENP023593 vlCDR1
KSSQSIVHSNGNTYLE

SEQ ID NO: 33251 - protein, 7 aa, synthetic construct
  source 1..7: note = Description of Artificial Sequence: Synthetic peptide; note = XENP023593 vlCDR2
KVSNRFS

SEQ ID NO: 33252 - protein, 9 aa, synthetic construct
  source 1..9: note = Description of Artificial Sequence: Synthetic peptide; note = XENP023593 vlCDR3
FQGSHVPNT

SEQ ID NO: 33253 - protein, 251 aa, synthetic construct
  source 1..251: note = Description of Artificial Sequence: Synthetic polypeptide; note = XENP023594 1C11_H3_L3.20_scFv
QIQLVQSGSELKKPGASVKVSCKASGYTFTHYGMNWVRQAPGQGLEWMGWINTYTGEPTYADGFTGRFVFSLDTSVSTAYLQISSLKAEDTAVYFCARDYYGSSPYWGQGTLVTVSSGKPGSGKPGSGKPGSGKPGSDVLMTQSPDSLAVSSGERATINCKSSQSIVHSNGNTYLEWYQQKPGQSPKLLIYKVSNRFSGVPDRFSGSGSGTDFTLTISSLQAEDVAVYYCFQGSHVPNTFGGGTKVEIKGS

SEQ ID NO: 33254 - protein, 117 aa, synthetic construct; identical to SEQ ID NO: 33034
  source 1..117: note = Description of Artificial Sequence: Synthetic polypeptide; note = VH of XENP023594

SEQ ID NO: 33255 - protein, 114 aa, synthetic construct
  source 1..114: note = Description of Artificial Sequence: Synthetic polypeptide; note = VL of XENP023594
DVLMTQSPDSLAVSSGERATINCKSSQSIVHSNGNTYLEWYQQKPGQSPKLLIYKVSNRFSGVPDRFSGSGSGTDFTLTISSLQAEDVAVYYCFQGSHVPNTFGGGTKVEIKGS

SEQ ID NO: 33256 - protein, 5 aa, synthetic construct
  source 1..5: note = Description of Artificial Sequence: Synthetic peptide; note = XENP023594 vhCDR1
HYGMN

SEQ ID NO: 33257 - protein, 17 aa, synthetic construct
  source 1..17: note = Description of Artificial Sequence: Synthetic peptide; note = XENP023594 vhCDR2
WINTYTGEPTYADGFTG

SEQ ID NO: 33258 - protein, 8 aa, synthetic construct
  source 1..8: note = Description of Artificial Sequence: Synthetic peptide; note = XENP023594 vhCDR3
DYYGSSPY

SEQ ID NO: 33259 - protein, 16 aa, synthetic construct
  source 1..16: note = Description of Artificial Sequence: Synthetic peptide; note = XENP023594 vlCDR1
KSSQSIVHSNGNTYLE

SEQ ID NO: 33260 - protein, 7 aa, synthetic construct
  source 1..7: note = Description of Artificial Sequence: Synthetic peptide; note = XENP023594 vlCDR2
KVSNRFS

SEQ ID NO: 33261 - protein, 9 aa, synthetic construct
  source 1..9: note = Description of Artificial Sequence: Synthetic peptide; note = XENP023594 vlCDR3
FQGSHVPNT

SEQ ID NO: 33262 - protein, 251 aa, synthetic construct
  source 1..251: note = Description of Artificial Sequence: Synthetic polypeptide; note = XENP023595 1C11_H3_L3.21_scFv
QIQLVQSGSELKKPGASVKVSCKASGYTFTHYGMNWVRQAPGQGLEWMGWINTYTGEPTYADGFTGRFVFSLDTSVSTAYLQISSLKAEDTAVYFCARDYYGSSPYWGQGTLVTVSSGKPGSGKPGSGKPGSGKPGSDVLMTQSPDSLAVSTGERATINCKSSQSIVHSNGNTYLEWYQQKPGQSPKLLIYKVSNRFSGVPDRFSGSGSGTDFTLTISSLQAEDVAVYYCFQGSHVPNTFGGGTKVEIKGS

SEQ ID NO: 33263 - protein, 117 aa, synthetic construct; identical to SEQ ID NO: 33034
  source 1..117: note = Description of Artificial Sequence: Synthetic polypeptide; note = VH of XENP023595

SEQ ID NO: 33264 - protein, 114 aa, synthetic construct
  source 1..114: note = Description of Artificial Sequence: Synthetic polypeptide; note = VL of XENP023595
DVLMTQSPDSLAVSTGERATINCKSSQSIVHSNGNTYLEWYQQKPGQSPKLLIYKVSNRFSGVPDRFSGSGSGTDFTLTISSLQAEDVAVYYCFQGSHVPNTFGGGTKVEIKGS

SEQ ID NO: 33265 - protein, 5 aa, synthetic construct
  source 1..5: note = Description of Artificial Sequence: Synthetic peptide; note = XENP023595 vhCDR1
HYGMN

SEQ ID NO: 33266 - protein, 17 aa, synthetic construct
  source 1..17: note = Description of Artificial Sequence: Synthetic peptide; note = XENP023595 vhCDR2
WINTYTGEPTYADGFTG

SEQ ID NO: 33267 - protein, 8 aa, synthetic construct
  source 1..8: note = Description of Artificial Sequence: Synthetic peptide; note = XENP023595 vhCDR3
DYYGSSPY

SEQ ID NO: 33268 - protein, 16 aa, synthetic construct
  source 1..16: note = Description of Artificial Sequence: Synthetic peptide; note = XENP023595 vlCDR1
KSSQSIVHSNGNTYLE

SEQ ID NO: 33269 - protein, 7 aa, synthetic construct
  source 1..7: note = Description of Artificial Sequence: Synthetic peptide; note = XENP023595 vlCDR2
KVSNRFS

SEQ ID NO: 33270 - protein, 9 aa, synthetic construct
  source 1..9: note = Description of Artificial Sequence: Synthetic peptide; note = XENP023595 vlCDR3
FQGSHVPNT

SEQ ID NO: 33271 - protein, 251 aa, synthetic construct
  source 1..251: note = Description of Artificial Sequence: Synthetic polypeptide; note = XENP023596 1C11_H3_L3.22_scFv
QIQLVQSGSELKKPGASVKVSCKASGYTFTHYGMNWVRQAPGQGLEWMGWINTYTGEPTYADGFTGRFVFSLDTSVSTAYLQISSLKAEDTAVYFCARDYYGSSPYWGQGTLVTVSSGKPGSGKPGSGKPGSGKPGSDVLMTQSPDSLAVSLGERITINCKSSQSIVHSNGNTYLEWYQQKPGQSPKLLIYKVSNRFSGVPDRFSGSGSGTDFTLTISSLQAEDVAVYYCFQGSHVPNTFGGGTKVEIKGS

SEQ ID NO: 33272 - protein, 117 aa, synthetic construct; identical to SEQ ID NO: 33034
  source 1..117: note = Description of Artificial Sequence: Synthetic polypeptide; note = VH of XENP023596

SEQ ID NO: 33273 - protein, 114 aa, synthetic construct
  source 1..114: note = Description of Artificial Sequence: Synthetic polypeptide; note = VL of XENP023596
DVLMTQSPDSLAVSLGERITINCKSSQSIVHSNGNTYLEWYQQKPGQSPKLLIYKVSNRFSGVPDRFSGSGSGTDFTLTISSLQAEDVAVYYCFQGSHVPNTFGGGTKVEIKGS

SEQ ID NO: 33274 - protein, 5 aa, synthetic construct
  source 1..5: note = Description of Artificial Sequence: Synthetic peptide; note = XENP023596 vhCDR1
HYGMN

SEQ ID NO: 33275 - protein, 17 aa, synthetic construct
  source 1..17: note = Description of Artificial Sequence: Synthetic peptide; note = XENP023596 vhCDR2
WINTYTGEPTYADGFTG

SEQ ID NO: 33276 - protein, 8 aa, synthetic construct
  source 1..8: note = Description of Artificial Sequence: Synthetic peptide; note = XENP023596 vhCDR3
DYYGSSPY

SEQ ID NO: 33277 - protein, 16 aa, synthetic construct
  source 1..16: note = Description of Artificial Sequence: Synthetic peptide; note = XENP023596 vlCDR1
KSSQSIVHSNGNTYLE

SEQ ID NO: 33278 - protein, 7 aa, synthetic construct
  source 1..7: note = Description of Artificial Sequence: Synthetic peptide; note = XENP023596 vlCDR2
KVSNRFS

SEQ ID NO: 33279 - protein, 9 aa, synthetic construct
  source 1..9: note = Description of Artificial Sequence: Synthetic peptide; note = XENP023596 vlCDR3
FQGSHVPNT

SEQ ID NO: 33280 - protein, 251 aa, synthetic construct
  source 1..251: note = Description of Artificial Sequence: Synthetic polypeptide; note = XENP023601 1C11_H3_L3.23_scFv
QIQLVQSGSELKKPGASVKVSCKASGYTFTHYGMNWVRQAPGQGLEWMGWINTYTGEPTYADGFTGRFVFSLDTSVSTAYLQISSLKAEDTAVYFCARDYYGSSPYWGQGTLVTVSSGKPGSGKPGSGKPGSGKPGSDVLMTQSPDSLAVSLGERVTINCKSSQSIVHSNGNTYLEWYQQKPGQSPKLLIYKVSNRFSGVPDRFSGSGSGTDFTLTISSLQAEDVAVYYCFQGSHVPNTFGGGTKVEIKGS

SEQ ID NO: 33281 - protein, 117 aa, synthetic construct; identical to SEQ ID NO: 33034
  source 1..117: note = Description of Artificial Sequence: Synthetic polypeptide; note = VH of XENP023601

SEQ ID NO: 33282 - protein, 114 aa, synthetic construct
  source 1..114: note = Description of Artificial Sequence: Synthetic polypeptide; note = VL of XENP023601
DVLMTQSPDSLAVSLGERVTINCKSSQSIVHSNGNTYLEWYQQKPGQSPKLLIYKVSNRFSGVPDRFSGSGSGTDFTLTISSLQAEDVAVYYCFQGSHVPNTFGGGTKVEIKGS

SEQ ID NO: 33283 - protein, 5 aa, synthetic construct
  source 1..5: note = Description of Artificial Sequence: Synthetic peptide; note = XENP023601 vhCDR1
HYGMN

SEQ ID NO: 33284 - protein, 17 aa, synthetic construct
  source 1..17: note = Description of Artificial Sequence: Synthetic peptide; note = XENP023601 vhCDR2
WINTYTGEPTYADGFTG

SEQ ID NO: 33285 - protein, 8 aa, synthetic construct
  source 1..8: note = Description of Artificial Sequence: Synthetic peptide; note = XENP023601 vhCDR3
DYYGSSPY

SEQ ID NO: 33286 - protein, 16 aa, synthetic construct
  source 1..16: note = Description of Artificial Sequence: Synthetic peptide; note = XENP023601 vlCDR1
KSSQSIVHSNGNTYLE

SEQ ID NO: 33287 - protein, 7 aa, synthetic construct
  source 1..7: note = Description of Artificial Sequence: Synthetic peptide; note = XENP023601 vlCDR2
KVSNRFS

SEQ ID NO: 33288 - protein, 9 aa, synthetic construct
  source 1..9: note = Description of Artificial Sequence: Synthetic peptide; note = XENP023601 vlCDR3
FQGSHVPNT

SEQ ID NO: 33289 - protein, 251 aa, synthetic construct
  source 1..251: note = Description of Artificial Sequence: Synthetic polypeptide; note = XENP023602 1C11_H3_L3.25_scFv
QIQLVQSGSELKKPGASVKVSCKASGYTFTHYGMNWVRQAPGQGLEWMGWINTYTGEPTYADGFTGRFVFSLDTSVSTAYLQISSLKAEDTAVYFCARDYYGSSPYWGQGTLVTVSSGKPGSGKPGSGKPGSGKPGSDVLMTQSPDSLAVSLGERATISCKSSQSIVHSNGNTYLEWYQQKPGQSPKLLIYKVSNRFSGVPDRFSGSGSGTDFTLTISSLQAEDVAVYYCFQGSHVPNTFGGGTKVEIKGS

SEQ ID NO: 33290 - protein, 117 aa, synthetic construct; identical to SEQ ID NO: 33034
  source 1..117: note = Description of Artificial Sequence: Synthetic polypeptide; note = VH of XENP023602

SEQ ID NO: 33291 - protein, 114 aa, synthetic construct
  source 1..114: note = Description of Artificial Sequence: Synthetic polypeptide; note = VL of XENP023602
DVLMTQSPDSLAVSLGERATISCKSSQSIVHSNGNTYLEWYQQKPGQSPKLLIYKVSNRFSGVPDRFSGSGSGTDFTLTISSLQAEDVAVYYCFQGSHVPNTFGGGTKVEIKGS

SEQ ID NO: 33292 - protein, 5 aa, synthetic construct
  source 1..5: note = Description of Artificial Sequence: Synthetic peptide; note = XENP023602 vhCDR1
HYGMN

SEQ ID NO: 33293 - protein, 17 aa, synthetic construct
  source 1..17: note = Description of Artificial Sequence: Synthetic peptide; note = XENP023602 vhCDR2
WINTYTGEPTYADGFTG

SEQ ID NO: 33294 - protein, 8 aa, synthetic construct
  source 1..8: note = Description of Artificial Sequence: Synthetic peptide; note = XENP023602 vhCDR3
DYYGSSPY

SEQ ID NO: 33295 - protein, 16 aa, synthetic construct
  source 1..16: note = Description of Artificial Sequence: Synthetic peptide; note = XENP023602 vlCDR1
KSSQSIVHSNGNTYLE

SEQ ID NO: 33296 - protein, 7 aa, synthetic construct
  source 1..7: note = Description of Artificial Sequence: Synthetic peptide; note = XENP023602 vlCDR2
KVSNRFS

SEQ ID NO: 33297 - protein, 9 aa, synthetic construct
  source 1..9: note = Description of Artificial Sequence: Synthetic peptide; note = XENP023602 vlCDR3
FQGSHVPNT

SEQ ID NO: 33298 - protein, 251 aa, synthetic construct
  source 1..251: note = Description of Artificial Sequence: Synthetic polypeptide; note = XENP023603 1C11_H3_L3.26_scFv
QIQLVQSGSELKKPGASVKVSCKASGYTFTHYGMNWVRQAPGQGLEWMGWINTYTGEPTYADGFTGRFVFSLDTSVSTAYLQISSLKAEDTAVYFCARDYYGSSPYWGQGTLVTVSSGKPGSGKPGSGKPGSGKPGSDVLMTQSPDSLAVSLGERATITCKSSQSIVHSNGNTYLEWYQQKPGQSPKLLIYKVSNRFSGVPDRFSGSGSGTDFTLTISSLQAEDVAVYYCFQGSHVPNTFGGGTKVEIKGS

SEQ ID NO: 33299 - protein, 117 aa, synthetic construct; identical to SEQ ID NO: 33034
  source 1..117: note = Description of Artificial Sequence: Synthetic polypeptide; note = VH of XENP023603

SEQ ID NO: 33300 - protein, 114 aa, synthetic construct
  source 1..114: note = Description of Artificial Sequence: Synthetic polypeptide; note = VL of XENP023603
DVLMTQSPDSLAVSLGERATITCKSSQSIVHSNGNTYLEWYQQKPGQSPKLLIYKVSNRFSGVPDRFSGSGSGTDFTLTISSLQAEDVAVYYCFQGSHVPNTFGGGTKVEIKGS

SEQ ID NO: 33301 - protein, 5 aa, synthetic construct
  source 1..5: note = Description of Artificial Sequence: Synthetic peptide; note = XENP023603 vhCDR1
HYGMN

SEQ ID NO: 33302 - protein, 17 aa, synthetic construct
  source 1..17: note = Description of Artificial Sequence: Synthetic peptide; note = XENP023603 vhCDR2
WINTYTGEPTYADGFTG

SEQ ID NO: 33303 - protein, 8 aa, synthetic construct
  source 1..8: note = Description of Artificial Sequence: Synthetic peptide; note = XENP023603 vhCDR3
DYYGSSPY

SEQ ID NO: 33304 - protein, 16 aa, synthetic construct
  source 1..16: note = Description of Artificial Sequence: Synthetic peptide; note = XENP023603 vlCDR1
KSSQSIVHSNGNTYLE

SEQ ID NO: 33305 - protein, 7 aa, synthetic construct
  source 1..7: note = Description of Artificial Sequence: Synthetic peptide; note = XENP023603 vlCDR2
KVSNRFS

SEQ ID NO: 33306 - protein, 9 aa, synthetic construct
  source 1..9: note = Description of Artificial Sequence: Synthetic peptide; note = XENP023603 vlCDR3
FQGSHVPNT

SEQ ID NO: 33307 - protein, 251 aa, synthetic construct
  source 1..251: note = Description of Artificial Sequence: Synthetic polypeptide; note = XENP023604 1C11_H3_L3.27_scFv
QIQLVQSGSELKKPGASVKVSCKASGYTFTHYGMNWVRQAPGQGLEWMGWINTYTGEPTYADGFTGRFVFSLDTSVSTAYLQISSLKAEDTAVYFCARDYYGSSPYWGQGTLVTVSSGKPGSGKPGSGKPGSGKPGSDVLMTQSPDSLAVSLGERATINCQSSQSIVHSNGNTYLEWYQQKPGQSPKLLIYKVSNRFSGVPDRFSGSGSGTDFTLTISSLQAEDVAVYYCFQGSHVPNTFGGGTKVEIKGS

SEQ ID NO: 33308 - protein, 117 aa, synthetic construct; identical to SEQ ID NO: 33034
  source 1..117: note = Description of Artificial Sequence: Synthetic polypeptide; note = VH of XENP023604

SEQ ID NO: 33309 - protein, 114 aa, synthetic construct
  source 1..114: note = Description of Artificial Sequence: Synthetic polypeptide; note = VL of XENP023604
DVLMTQSPDSLAVSLGERATINCQSSQSIVHSNGNTYLEWYQQKPGQSPKLLIYKVSNRFSGVPDRFSGSGSGTDFTLTISSLQAEDVAVYYCFQGSHVPNTFGGGTKVEIKGS

SEQ ID NO: 33310 - protein, 5 aa, synthetic construct
  source 1..5: note = Description of Artificial Sequence: Synthetic peptide; note = XENP023604 vhCDR1
HYGMN

SEQ ID NO: 33311 - protein, 17 aa, synthetic construct
  source 1..17: note = Description of Artificial Sequence: Synthetic peptide; note = XENP023604 vhCDR2
WINTYTGEPTYADGFTG

SEQ ID NO: 33312 - protein, 8 aa, synthetic construct
  source 1..8: note = Description of Artificial Sequence: Synthetic peptide; note = XENP023604 vhCDR3
DYYGSSPY

SEQ ID NO: 33313 - protein, 16 aa, synthetic construct
  source 1..16: note = Description of Artificial Sequence: Synthetic peptide; note = XENP023604 vlCDR1
QSSQSIVHSNGNTYLE

SEQ ID NO: 33314 - protein, 7 aa, synthetic construct
  source 1..7: note = Description of Artificial Sequence: Synthetic peptide; note = XENP023604 vlCDR2
KVSNRFS

SEQ ID NO: 33315 - protein, 9 aa, synthetic construct
  source 1..9: note = Description of Artificial Sequence: Synthetic peptide; note = XENP023604 vlCDR3
FQGSHVPNT

SEQ ID NO: 33316 - protein, 251 aa, synthetic construct
  source 1..251: note = Description of Artificial Sequence: Synthetic polypeptide; note = XENP023605 1C11_H3_L3.28_scFv
QIQLVQSGSELKKPGASVKVSCKASGYTFTHYGMNWVRQAPGQGLEWMGWINTYTGEPTYADGFTGRFVFSLDTSVSTAYLQISSLKAEDTAVYFCARDYYGSSPYWGQGTLVTVSSGKPGSGKPGSGKPGSGKPGSDVLMTQSPDSLAVSLGERATINCRSSQSIVHSNGNTYLEWYQQKPGQSPKLLIYKVSNRFSGVPDRFSGSGSGTDFTLTISSLQAEDVAVYYCFQGSHVPNTFGGGTKVEIKGS

SEQ ID NO: 33317 - protein, 117 aa, synthetic construct; identical to SEQ ID NO: 33034
  source 1..117: note = Description of Artificial Sequence: Synthetic polypeptide; note = VH of XENP023605

SEQ ID NO: 33318 - protein, 114 aa, synthetic construct
  source 1..114: note = Description of Artificial Sequence: Synthetic polypeptide; note = VL of XENP023605
DVLMTQSPDSLAVSLGERATINCRSSQSIVHSNGNTYLEWYQQKPGQSPKLLIYKVSNRFSGVPDRFSGSGSGTDFTLTISSLQAEDVAVYYCFQGSHVPNTFGGGTKVEIKGS

SEQ ID NO: 33319 - protein, 5 aa, synthetic construct
  source 1..5: note = Description of Artificial Sequence: Synthetic peptide; note = XENP023605 vhCDR1
HYGMN

SEQ ID NO: 33320 - protein, 17 aa, synthetic construct
  source 1..17: note = Description of Artificial Sequence: Synthetic peptide; note = XENP023605 vhCDR2
WINTYTGEPTYADGFTG

SEQ ID NO: 33321 - protein, 8 aa, synthetic construct
  source 1..8: note = Description of Artificial Sequence: Synthetic peptide; note = XENP023605 vhCDR3
DYYGSSPY

SEQ ID NO: 33322 - protein, 16 aa, synthetic construct
  source 1..16: note = Description of Artificial Sequence: Synthetic peptide; note = XENP023605 vlCDR1
RSSQSIVHSNGNTYLE

SEQ ID NO: 33323 - protein, 7 aa, synthetic construct
  source 1..7: note = Description of Artificial Sequence: Synthetic peptide; note = XENP023605 vlCDR2
KVSNRFS

SEQ ID NO: 33324 - protein, 9 aa, synthetic construct
  source 1..9: note = Description of Artificial Sequence: Synthetic peptide; note = XENP023605 vlCDR3
FQGSHVPNT

SEQ ID NO: 33325 - protein, 251 aa, synthetic construct
  source 1..251: note = Description of Artificial Sequence: Synthetic polypeptide; note = XENP023606 1C11_H3_L3.29_scFv
QIQLVQSGSELKKPGASVKVSCKASGYTFTHYGMNWVRQAPGQGLEWMGWINTYTGEPTYADGFTGRFVFSLDTSVSTAYLQISSLKAEDTAVYFCARDYYGSSPYWGQGTLVTVSSGKPGSGKPGSGKPGSGKPGSDVLMTQSPDSLAVSLGERATINCSSSQSIVHSNGNTYLEWYQQKPGQSPKLLIYKVSNRFSGVPDRFSGSGSGTDFTLTISSLQAEDVAVYYCFQGSHVPNTFGGGTKVEIKGS

SEQ ID NO: 33326 - protein, 117 aa, synthetic construct; identical to SEQ ID NO: 33034
  source 1..117: note = Description of Artificial Sequence: Synthetic polypeptide; note = VH of XENP023606

SEQ ID NO: 33327 - protein, 114 aa, synthetic construct
  source 1..114: note = Description of Artificial Sequence: Synthetic polypeptide; note = VL of XENP023606
DVLMTQSPDSLAVSLGERATINCSSSQSIVHSNGNTYLEWYQQKPGQSPKLLIYKVSNRFSGVPDRFSGSGSGTDFTLTISSLQAEDVAVYYCFQGSHVPNTFGGGTKVEIKGS

SEQ ID NO: 33328 - protein, 5 aa, synthetic construct
  source 1..5: note = Description of Artificial Sequence: Synthetic peptide; note = XENP023606 vhCDR1
HYGMN

SEQ ID NO: 33329 - protein, 17 aa, synthetic construct
  source 1..17: note = Description of Artificial Sequence: Synthetic peptide; note = XENP023606 vhCDR2
WINTYTGEPTYADGFTG

SEQ ID NO: 33330 - protein, 8 aa, synthetic construct
  source 1..8: note = Description of Artificial Sequence: Synthetic peptide; note = XENP023606 vhCDR3
DYYGSSPY

SEQ ID NO: 33331 - protein, 16 aa, synthetic construct
  source 1..16: note = Description of Artificial Sequence: Synthetic peptide; note = XENP023606 vlCDR1
SSSQSIVHSNGNTYLE

SEQ ID NO: 33332 - protein, 7 aa, synthetic construct
  source 1..7: note = Description of Artificial Sequence: Synthetic peptide; note = XENP023606 vlCDR2
KVSNRFS

SEQ ID NO: 33333 - protein, 9 aa, synthetic construct
  source 1..9: note = Description of Artificial Sequence: Synthetic peptide; note = XENP023606 vlCDR3
FQGSHVPNT

SEQ ID NO: 33334 - protein, 251 aa, synthetic construct
  source 1..251: note = Description of Artificial Sequence: Synthetic polypeptide; note = XENP023607 1C11_H3_L3.30_scFv
QIQLVQSGSELKKPGASVKVSCKASGYTFTHYGMNWVRQAPGQGLEWMGWINTYTGEPTYADGFTGRFVFSLDTSVSTAYLQISSLKAEDTAVYFCARDYYGSSPYWGQGTLVTVSSGKPGSGKPGSGKPGSGKPGSDVLMTQSPDSLAVSLGERATINCTSSQSIVHSNGNTYLEWYQQKPGQSPKLLIYKVSNRFSGVPDRFSGSGSGTDFTLTISSLQAEDVAVYYCFQGSHVPNTFGGGTKVEIKGS

SEQ ID NO: 33335 - protein, 117 aa, synthetic construct; identical to SEQ ID NO: 33034
  source 1..117: note = Description of Artificial Sequence: Synthetic polypeptide; note = VH of XENP023607

SEQ ID NO: 33336 - protein, 114 aa, synthetic construct
  source 1..114: note = Description of Artificial Sequence: Synthetic polypeptide; note = VL of XENP023607
DVLMTQSPDSLAVSLGERATINCTSSQSIVHSNGNTYLEWYQQKPGQSPKLLIYKVSNRFSGVPDRFSGSGSGTDFTLTISSLQAEDVAVYYCFQGSHVPNTFGGGTKVEIKGS

SEQ ID NO: 33337 - protein, 5 aa, synthetic construct
  source 1..5: note = Description of Artificial Sequence: Synthetic peptide; note = XENP023607 vhCDR1
HYGMN

SEQ ID NO: 33338 - protein, 17 aa, synthetic construct
  source 1..17: note = Description of Artificial Sequence: Synthetic peptide; note = XENP023607 vhCDR2
WINTYTGEPTYADGFTG

SEQ ID NO: 33339 - protein, 8 aa, synthetic construct
  source 1..8: note = Description of Artificial Sequence: Synthetic peptide; note = XENP023607 vhCDR3
DYYGSSPY

SEQ ID NO: 33340 - protein, 16 aa, synthetic construct
  source 1..16: note = Description of Artificial Sequence: Synthetic peptide; note = XENP023607 vlCDR1
TSSQSIVHSNGNTYLE

SEQ ID NO: 33341 - protein, 7 aa, synthetic construct
  source 1..7: note = Description of Artificial Sequence: Synthetic peptide; note = XENP023607 vlCDR2
KVSNRFS

SEQ ID NO: 33342 - protein, 9 aa, synthetic construct
  source 1..9: note = Description of Artificial Sequence: Synthetic peptide; note = XENP023607 vlCDR3
FQGSHVPNT

SEQ ID NO: 33343 - protein, 251 aa, synthetic construct
  source 1..251: note = Description of Artificial Sequence: Synthetic polypeptide; note = XENP023608 1C11_H3_L3.31_scFv
QIQLVQSGSELKKPGASVKVSCKASGYTFTHYGMNWVRQAPGQGLEWMGWINTYTGEPTYADGFTGRFVFSLDTSVSTAYLQISSLKAEDTAVYFCARDYYGSSPYWGQGTLVTVSSGKPGSGKPGSGKPGSGKPGSDVLMTQSPDSLAVSLGERATINCKTSQSIVHSNGNTYLEWYQQKPGQSPKLLIYKVSNRFSGVPDRFSGSGSGTDFTLTISSLQAEDVAVYYCFQGSHVPNTFGGGTKVEIKGS

SEQ ID NO: 33344 - protein, 117 aa, synthetic construct; identical to SEQ ID NO: 33034
  source 1..117: note = Description of Artificial Sequence: Synthetic polypeptide; note = VH of XENP023608

SEQ ID NO: 33345 - protein, 114 aa, synthetic construct
  source 1..114: note = Description of Artificial Sequence: Synthetic polypeptide; note = VL of XENP023608
DVLMTQSPDSLAVSLGERATINCKTSQSIVHSNGNTYLEWYQQKPGQSPKLLIYKVSNRFSGVPDRFSGSGSGTDFTLTISSLQAEDVAVYYCFQGSHVPNTFGGGTKVEIKGS

SEQ ID NO: 33346 - protein, 5 aa, synthetic construct
  source 1..5: note = Description of Artificial Sequence: Synthetic peptide; note = XENP023608 vhCDR1
HYGMN

SEQ ID NO: 33347 - protein, 17 aa, synthetic construct
  source 1..17: note = Description of Artificial Sequence: Synthetic peptide; note = XENP023608 vhCDR2
WINTYTGEPTYADGFTG

SEQ ID NO: 33348 - protein, 8 aa, synthetic construct
  source 1..8: note = Description of Artificial Sequence: Synthetic peptide; note = XENP023608 vhCDR3
DYYGSSPY

SEQ ID NO: 33349 - protein, 16 aa, synthetic construct
  source 1..16: note = Description of Artificial Sequence: Synthetic peptide; note = XENP023608 vlCDR1
KTSQSIVHSNGNTYLE

SEQ ID NO: 33350 - protein, 7 aa, synthetic construct
  source 1..7: note = Description of Artificial Sequence: Synthetic peptide; note = XENP023608 vlCDR2
KVSNRFS

SEQ ID NO: 33351 - protein, 9 aa, synthetic construct
  source 1..9: note = Description of Artificial Sequence: Synthetic peptide; note = XENP023608 vlCDR3
FQGSHVPNT

SEQ ID NO: 33352 - protein, 251 aa, synthetic construct
  source 1..251: note = Description of Artificial Sequence: Synthetic polypeptide; note = XENP023609 1C11_H3_L3.32_scFv
QIQLVQSGSELKKPGASVKVSCKASGYTFTHYGMNWVRQAPGQGLEWMGWINTYTGEPTYADGFTGRFVFSLDTSVSTAYLQISSLKAEDTAVYFCARDYYGSSPYWGQGTLVTVSSGKPGSGKPGSGKPGSGKPGSDVLMTQSPDSLAVSLGERATINCKASQSIVHSNGNTYLEWYQQKPGQSPKLLIYKVSNRFSGVPDRFSGSGSGTDFTLTISSLQAEDVAVYYCFQGSHVPNTFGGGTKVEIKGS

SEQ ID NO: 33353 - protein, 117 aa, synthetic construct; identical to SEQ ID NO: 33034
  source 1..117: note = Description of Artificial Sequence: Synthetic polypeptide; note = VH of XENP023609

SEQ ID NO: 33354 - protein, 114 aa, synthetic construct
  source 1..114: note = Description of Artificial Sequence: Synthetic polypeptide; note = VL of XENP023609
DVLMTQSPDSLAVSLGERATINCKASQSIVHSNGNTYLEWYQQKPGQSPKLLIYKVSNRFSGVPDRFSGSGSGTDFTLTISSLQAEDVAVYYCFQGSHVPNTFGGGTKVEIKGS

SEQ ID NO: 33355 - protein, 5 aa, synthetic construct
  source 1..5: note = Description of Artificial Sequence: Synthetic peptide; note = XENP023609 vhCDR1
HYGMN

SEQ ID NO: 33356 - protein, 17 aa, synthetic construct
  source 1..17: note = Description of Artificial Sequence: Synthetic peptide; note = XENP023609 vhCDR2
WINTYTGEPTYADGFTG

SEQ ID NO: 33357 - protein, 8 aa, synthetic construct
  source 1..8: note = Description of Artificial Sequence: Synthetic peptide; note = XENP023609 vhCDR3
DYYGSSPY

SEQ ID NO: 33358 - protein, 16 aa, synthetic construct
  source 1..16: note = Description of Artificial Sequence: Synthetic peptide; note = XENP023609 vlCDR1
KASQSIVHSNGNTYLE

SEQ ID NO: 33359 - protein, 7 aa, synthetic construct
  source 1..7: note = Description of Artificial Sequence: Synthetic peptide; note = XENP023609 vlCDR2
KVSNRFS

SEQ ID NO: 33360 - protein, 9 aa, synthetic construct
  source 1..9: note = Description of Artificial Sequence: Synthetic peptide; note = XENP023609 vlCDR3
FQGSHVPNT

SEQ ID NO: 33361 - protein, 251 aa, synthetic construct
  source 1..251: note = Description of Artificial Sequence: Synthetic polypeptide; note = XENP023610 1C11_H3_L3.34_scFv
QIQLVQSGSELKKPGASVKVSCKASGYTFTHYGMNWVRQAPGQGLEWMGWINTYTGEPTYADGFTGRFVFSLDTSVSTAYLQISSLKAEDTAVYFCARDYYGSSPYWGQGTLVTVSSGKPGSGKPGSGKPGSGKPGSDVLMTQSPDSLAVSLGERATINCKSSQSVVHSNGNTYLEWYQQKPGQSPKLLIYKVSNRFSGVPDRFSGSGSGTDFTLTISSLQAEDVAVYYCFQGSHVPNTFGGGTKVEIKGS

SEQ ID NO: 33362 - protein, 117 aa, synthetic construct; identical to SEQ ID NO: 33034
  source 1..117: note = Description of Artificial Sequence: Synthetic polypeptide; note = VH of XENP023610

SEQ ID NO: 33363 - protein, 114 aa, synthetic construct
  source 1..114: note = Description of Artificial Sequence: Synthetic polypeptide; note = VL of XENP023610
DVLMTQSPDSLAVSLGERATINCKSSQSVVHSNGNTYLEWYQQKPGQSPKLLIYKVSNRFSGVPDRFSGSGSGTDFTLTISSLQAEDVAVYYCFQGSHVPNTFGGGTKVEIKGS

SEQ ID NO: 33364 - protein, 5 aa, synthetic construct
  source 1..5: note = Description of Artificial Sequence: Synthetic peptide; note = XENP023610 vhCDR1
HYGMN

SEQ ID NO: 33365 - protein, 17 aa, synthetic construct
  source 1..17: note = Description of Artificial Sequence: Synthetic peptide; note = XENP023610 vhCDR2
WINTYTGEPTYADGFTG

SEQ ID NO: 33366 - protein, 8 aa, synthetic construct
  source 1..8: note = Description of Artificial Sequence: Synthetic peptide; note = XENP023610 vhCDR3
DYYGSSPY

SEQ ID NO: 33367 - protein, 16 aa, synthetic construct
  source 1..16: note = Description of Artificial Sequence: Synthetic peptide; note = XENP023610 vlCDR1
KSSQSVVHSNGNTYLE

SEQ ID NO: 33368 - protein, 7 aa, synthetic construct
  source 1..7: note = Description of Artificial Sequence: Synthetic peptide; note = XENP023610 vlCDR2
KVSNRFS

SEQ ID NO: 33369 - protein, 9 aa, synthetic construct
  source 1..9: note = Description of Artificial Sequence: Synthetic peptide; note = XENP023610 vlCDR3
FQGSHVPNT

SEQ ID NO: 33370 - protein, 251 aa, synthetic construct
  source 1..251: note = Description of Artificial Sequence: Synthetic polypeptide; note = XENP023611 1C11_H3_L3.35_scFv
QIQLVQSGSELKKPGASVKVSCKASGYTFTHYGMNWVRQAPGQGLEWMGWINTYTGEPTYADGFTGRFVFSLDTSVSTAYLQISSLKAEDTAVYFCARDYYGSSPYWGQGTLVTVSSGKPGSGKPGSGKPGSGKPGSDVLMTQSPDSLAVSLGERATINCKSSQSAVHSNGNTYLEWYQQKPGQSPKLLIYKVSNRFSGVPDRFSGSGSGTDFTLTISSLQAEDVAVYYCFQGSHVPNTFGGGTKVEIKGS

SEQ ID NO: 33371 - protein, 117 aa, synthetic construct; identical to SEQ ID NO: 33034
  source 1..117: note = Description of Artificial Sequence: Synthetic polypeptide; note = VH of XENP023611

SEQ ID NO: 33372 - protein, 114 aa, synthetic construct
  source 1..114: note = Description of Artificial Sequence: Synthetic polypeptide; note = VL of XENP023611
DVLMTQSPDSLAVSLGERATINCKSSQSAVHSNGNTYLEWYQQKPGQSPKLLIYKVSNRFSGVPDRFSGSGSGTDFTLTISSLQAEDVAVYYCFQGSHVPNTFGGGTKVEIKGS

SEQ ID NO: 33373 - protein, 5 aa, synthetic construct
  source 1..5: note = Description of Artificial Sequence: Synthetic peptide; note = XENP023611 vhCDR1
HYGMN

SEQ ID NO: 33374 - protein, 17 aa, synthetic construct
  source 1..17: note = Description of Artificial Sequence: Synthetic peptide; note = XENP023611 vhCDR2
WINTYTGEPTYADGFTG

SEQ ID NO: 33375 - protein, 8 aa, synthetic construct
  source 1..8: note = Description of Artificial Sequence: Synthetic peptide; note = XENP023611 vhCDR3
DYYGSSPY

SEQ ID NO: 33376 - protein, 16 aa, synthetic construct
  source 1..16: note = Description of Artificial Sequence: Synthetic peptide; note = XENP023611 vlCDR1
KSSQSAVHSNGNTYLE

SEQ ID NO: 33377 - protein, 7 aa, synthetic construct
  source 1..7: note = Description of Artificial Sequence: Synthetic peptide; note = XENP023611 vlCDR2
KVSNRFS

SEQ ID NO: 33378 - protein, 9 aa, synthetic construct
  source 1..9: note = Description of Artificial Sequence: Synthetic peptide; note = XENP023611 vlCDR3
FQGSHVPNT

SEQ ID NO: 33379 - protein, 251 aa, synthetic construct
  source 1..251: note = Description of Artificial Sequence: Synthetic polypeptide; note = XENP023612 1C11_H3_L3.36_scFv
QIQLVQSGSELKKPGASVKVSCKASGYTFTHYGMNWVRQAPGQGLEWMGWINTYTGEPTYADGFTGRFVFSLDTSVSTAYLQISSLKAEDTAVYFCARDYYGSSPYWGQGTLVTVSSGKPGSGKPGSGKPGSGKPGSDVLMTQSPDSLAVSLGERATINCKSSQSIVHSSNNTYLEWYQQKPGQSPKLLIYKVSNRFSGVPDRFSGSGSGTDFTLTISSLQAEDVAVYYCFQGSHVPNTFGGGTKVEIKGS

SEQ ID NO: 33380 - protein, 117 aa, synthetic construct; identical to SEQ ID NO: 33034
  source 1..117: note = Description of Artificial Sequence: Synthetic polypeptide; note = VH of XENP023612

SEQ ID NO: 33381 - protein, 114 aa, synthetic construct
  source 1..114: note = Description of Artificial Sequence: Synthetic polypeptide; note = VL of XENP023612
DVLMTQSPDSLAVSLGERATINCKSSQSIVHSSNNTYLEWYQQKPGQSPKLLIYKVSNRFSGVPDRFSGSGSGTDFTLTISSLQAEDVAVYYCFQGSHVPNTFGGGTKVEIKGS

SEQ ID NO: 33382 - protein, 5 aa, synthetic construct
  source 1..5: note = Description of Artificial Sequence: Synthetic peptide; note = XENP023612 vhCDR1
HYGMN

SEQ ID NO: 33383 - protein, 17 aa, synthetic construct
  source 1..17: note = Description of Artificial Sequence: Synthetic peptide; note = XENP023612 vhCDR2
WINTYTGEPTYADGFTG

SEQ ID NO: 33384 - protein, 8 aa, synthetic construct
  source 1..8: note = Description of Artificial Sequence: Synthetic peptide; note = XENP023612 vhCDR3
DYYGSSPY

SEQ ID NO: 33385 - protein, 16 aa, synthetic construct
  source 1..16: note = Description of Artificial Sequence: Synthetic peptide; note = XENP023612 vlCDR1
KSSQSIVHSSNNTYLE

SEQ ID NO: 33386 - protein, 7 aa, synthetic construct
  source 1..7: note = Description of Artificial Sequence: Synthetic peptide; note = XENP023612 vlCDR2
KVSNRFS

SEQ ID NO: 33387 - protein, 9 aa, synthetic construct
  source 1..9: note = Description of Artificial Sequence: Synthetic peptide; note = XENP023612 vlCDR3
FQGSHVPNT

SEQ ID NO: 33388 - protein, 251 aa, synthetic construct
  source 1..251: note = Description of Artificial Sequence: Synthetic polypeptide; note = XENP023613 1C11_H3_L3.37_scFv
QIQLVQSGSELKKPGASVKVSCKASGYTFTHYGMNWVRQAPGQGLEWMGWINTYTGEPTYADGFTGRFVFSLDTSVSTAYLQISSLKAEDTAVYFCARDYYGSSPYWGQGTLVTVSSGKPGSGKPGSGKPGSGKPGSDVLMTQSPDSLAVSLGERATINCKSSQSIVHSNGNSYLEWYQQKPGQSPKLLIYKVSNRFSGVPDRFSGSGSGTDFTLTISSLQAEDVAVYYCFQGSHVPNTFGGGTKVEIKGS

SEQ ID NO: 33389 - protein, 117 aa, synthetic construct; identical to SEQ ID NO: 33034
  source 1..117: note = Description of Artificial Sequence: Synthetic polypeptide; note = VH of XENP023613

SEQ ID NO: 33390 - protein, 114 aa, synthetic construct
  source 1..114: note = Description of Artificial Sequence: Synthetic polypeptide; note = VL of XENP023613
DVLMTQSPDSLAVSLGERATINCKSSQSIVHSNGNSYLEWYQQKPGQSPKLLIYKVSNRFSGVPDRFSGSGSGTDFTLTISSLQAEDVAVYYCFQGSHVPNTFGGGTKVEIKGS

SEQ ID NO: 33391 - protein, 5 aa, synthetic construct
  source 1..5: note = Description of Artificial Sequence: Synthetic peptide; note = XENP023613 vhCDR1
HYGMN

SEQ ID NO: 33392 - protein, 17 aa, synthetic construct
  source 1..17: note = Description of Artificial Sequence: Synthetic peptide; note = XENP023613 vhCDR2
WINTYTGEPTYADGFTG

SEQ ID NO: 33393 - protein, 8 aa, synthetic construct
  source 1..8: note = Description of Artificial Sequence: Synthetic peptide; note = XENP023613 vhCDR3
DYYGSSPY

SEQ ID NO: 33394 - protein, 16 aa, synthetic construct
  source 1..16: note = Description of Artificial Sequence: Synthetic peptide; note = XENP023613 vlCDR1
KSSQSIVHSNGNSYLE

SEQ ID NO: 33395 - protein, 7 aa, synthetic construct
  source 1..7: note = Description of Artificial Sequence: Synthetic peptide; note = XENP023613 vlCDR2
KVSNRFS

SEQ ID NO: 33396 - protein, 9 aa, synthetic construct
  source 1..9: note = Description of Artificial Sequence: Synthetic peptide; note = XENP023613 vlCDR3
FQGSHVPNT

SEQ ID NO: 33397 - protein, 251 aa, synthetic construct
  source 1..251: note = Description of Artificial Sequence: Synthetic polypeptide; note = XENP023614 1C11_H3_L3.38_scFv
QIQLVQSGSELKKPGASVKVSCKASGYTFTHYGMNWVRQAPGQGLEWMGWINTYTGEPTYADGFTGRFVFSLDTSVSTAYLQISSLKAEDTAVYFCARDYYGSSPYWGQGTLVTVSSGKPGSGKPGSGKPGSGKPGSDVLMTQSPDSLAVSLGERATINCKSSQSIVHSNGNNYLEWYQQKPGQSPKLLIYKVSNRFSGVPDRFSGSGSGTDFTLTISSLQAEDVAVYYCFQGSHVPNTFGGGTKVEIKGS

SEQ ID NO: 33398 - protein, 117 aa, synthetic construct; identical to SEQ ID NO: 33034
  source 1..117: note = Description of Artificial Sequence: Synthetic polypeptide; note = VH of XENP023614

SEQ ID NO: 33399 - protein, 114 aa, synthetic construct
  source 1..114: note = Description of Artificial Sequence: Synthetic polypeptide; note = VL of XENP023614
DVLMTQSPDSLAVSLGERATINCKSSQSIVHSNGNNYLEWYQQKPGQSPKLLIYKVSNRFSGVPDRFSGSGSGTDFTLTISSLQAEDVAVYYCFQGSHVPNTFGGGTKVEIKGS

SEQ ID NO: 33400 - protein, 5 aa, synthetic construct
  source 1..5: note = Description of Artificial Sequence: Synthetic peptide; note = XENP023614 vhCDR1
HYGMN

SEQ ID NO: 33401 - protein, 17 aa, synthetic construct
  source 1..17: note = Description of Artificial Sequence: Synthetic peptide; note = XENP023614 vhCDR2
WINTYTGEPTYADGFTG

SEQ ID NO: 33402 - protein, 8 aa, synthetic construct
  source 1..8: note = Description of Artificial Sequence: Synthetic peptide; note = XENP023614 vhCDR3
DYYGSSPY

SEQ ID NO: 33403 - protein, 16 aa, synthetic construct
  source 1..16: note = Description of Artificial Sequence: Synthetic peptide; note = XENP023614 vlCDR1
KSSQSIVHSNGNNYLE

SEQ ID NO: 33404 - protein, 7 aa, synthetic construct
  source 1..7: note = Description of Artificial Sequence: Synthetic peptide; note = XENP023614 vlCDR2
KVSNRFS

SEQ ID NO: 33405 - protein, 9 aa, synthetic construct
  source 1..9: note = Description of Artificial Sequence: Synthetic peptide; note = XENP023614 vlCDR3
FQGSHVPNT

SEQ ID NO: 33406 - protein, 251 aa, synthetic construct
  source 1..251: note = Description of Artificial Sequence: Synthetic polypeptide; note = XENP023615 1C11_H3_L3.46_scFv
QIQLVQSGSELKKPGASVKVSCKASGYTFTHYGMNWVRQAPGQGLEWMGWINTYTGEPTYADGFTGRFVFSLDTSVSTAYLQISSLKAEDTAVYFCARDYYGSSPYWGQGTLVTVSSGKPGSGKPGSGKPGSGKPGSDVLMTQSPDSLAVSLGERATINCKSSQSIVHSNGNTYLEWYQQKPGQPPKLLIYKVSNRFSGVPDRFSGSGSGTDFTLTISSLQAEDVAVYYCFQGSHVPNTFGGGTKVEIKGS

SEQ ID NO: 33407 - protein, 117 aa, synthetic construct; identical to SEQ ID NO: 33034
  source 1..117: note = Description of Artificial Sequence: Synthetic polypeptide; note = VH of XENP023615

SEQ ID NO: 33408 - protein, 114 aa, synthetic construct
  source 1..114: note = Description of Artificial Sequence: Synthetic polypeptide; note = VL of XENP023615
DVLMTQSPDSLAVSLGERATINCKSSQSIVHSNGNTYLEWYQQKPGQPPKLLIYKVSNRFSGVPDRFSGSGSGTDFTLTISSLQAEDVAVYYCFQGSHVPNTFGGGTKVEIKGS

SEQ ID NO: 33409 - protein, 5 aa, synthetic construct
  source 1..5: note = Description of Artificial Sequence: Synthetic peptide; note = XENP023615 vhCDR1
HYGMN

SEQ ID NO: 33410 - protein, 17 aa, synthetic construct
  source 1..17: note = Description of Artificial Sequence: Synthetic peptide; note = XENP023615 vhCDR2
WINTYTGEPTYADGFTG

SEQ ID NO: 33411 - protein, 8 aa, synthetic construct
  source 1..8: note = Description of Artificial Sequence: Synthetic peptide; note = XENP023615 vhCDR3
DYYGSSPY

SEQ ID NO: 33412 - protein, 16 aa, synthetic construct
  source 1..16: note = Description of Artificial Sequence: Synthetic peptide; note = XENP023615 vlCDR1
KSSQSIVHSNGNTYLE

SEQ ID NO: 33413 - protein, 7 aa, synthetic construct
  source 1..7: note = Description of Artificial Sequence: Synthetic peptide; note = XENP023615 vlCDR2
KVSNRFS

SEQ ID NO: 33414 - protein, 9 aa, synthetic construct
  source 1..9: note = Description of Artificial Sequence: Synthetic peptide; note = XENP023615 vlCDR3
FQGSHVPNT

SEQ ID NO: 33415 - protein, 251 aa, synthetic construct
  source 1..251: note = Description of Artificial Sequence: Synthetic polypeptide; note = XENP023616 1C11_H3_L3.47_scFv
QIQLVQSGSELKKPGASVKVSCKASGYTFTHYGMNWVRQAPGQGLEWMGWINTYTGEPTYADGFTGRFVFSLDTSVSTAYLQISSLKAEDTAVYFCARDYYGSSPYWGQGTLVTVSSGKPGSGKPGSGKPGSGKPGSDVLMTQSPDSLAVSLGERATINCKSSQSIVHSNGNTYLEWYQQKPGQAPKLLIYKVSNRFSGVPDRFSGSGSGTDFTLTISSLQAEDVAVYYCFQGSHVPNTFGGGTKVEIKGS

SEQ ID NO: 33416 - protein, 117 aa, synthetic construct; identical to SEQ ID NO: 33034
  source 1..117: note = Description of Artificial Sequence: Synthetic polypeptide; note = VH of XENP023616

SEQ ID NO: 33417 - protein, 114 aa, synthetic construct
  source 1..114: note = Description of Artificial Sequence: Synthetic polypeptide; note = VL of XENP023616
DVLMTQSPDSLAVSLGERATINCKSSQSIVHSNGNTYLEWYQQKPGQAPKLLIYKVSNRFSGVPDRFSGSGSGTDFTLTISSLQAEDVAVYYCFQGSHVPNTFGGGTKVEIKGS

SEQ ID NO: 33418 - protein, 5 aa, synthetic construct
  source 1..5: note = Description of Artificial Sequence: Synthetic peptide; note = XENP023616 vhCDR1
HYGMN

SEQ ID NO: 33419 - protein, 17 aa, synthetic construct
  source 1..17: note = Description of Artificial Sequence: Synthetic peptide; note = XENP023616 vhCDR2
WINTYTGEPTYADGFTG

SEQ ID NO: 33420 - protein, 8 aa, synthetic construct
  source 1..8: note = Description of Artificial Sequence: Synthetic peptide; note = XENP023616 vhCDR3
DYYGSSPY

SEQ ID NO: 33421 - protein, 16 aa, synthetic construct
  source 1..16: note = Description of Artificial Sequence: Synthetic peptide; note = XENP023616 vlCDR1
KSSQSIVHSNGNTYLE

SEQ ID NO: 33422 - protein, 7 aa, synthetic construct
  source 1..7: note = Description of Artificial Sequence: Synthetic peptide; note = XENP023616 vlCDR2
KVSNRFS

SEQ ID NO: 33423 - protein, 9 aa, synthetic construct
  source 1..9: note = Description of Artificial Sequence: Synthetic peptide; note = XENP023616 vlCDR3
FQGSHVPNT

SEQ ID NO: 33424 - protein, 251 aa, synthetic construct
  source 1..251: note = Description of Artificial Sequence: Synthetic polypeptide; note = XENP023617 1C11_H3_L3.49_scFv
QIQLVQSGSELKKPGASVKVSCKASGYTFTHYGMNWVRQAPGQGLEWMGWINTYTGEPTYADGFTGRFVFSLDTSVSTAYLQISSLKAEDTAVYFCARDYYGSSPYWGQGTLVTVSSGKPGSGKPGSGKPGSGKPGSDVLMTQSPDSLAVSLGERATINCKSSQSIVHSNGNTYLEWYQQKPGQSPKLLIYGVSNRFSGVPDRFSGSGSGTDFTLTISSLQAEDVAVYYCFQGSHVPNTFGGGTKVEIKGS

SEQ ID NO: 33425 - protein, 117 aa, synthetic construct; identical to SEQ ID NO: 33034
  source 1..117: note = Description of Artificial Sequence: Synthetic polypeptide; note = VH of XENP023617

SEQ ID NO: 33426 - protein, 114 aa, synthetic construct
  source 1..114: note = Description of Artificial Sequence: Synthetic polypeptide; note = VL of XENP023617
DVLMTQSPDSLAVSLGERATINCKSSQSIVHSNGNTYLEWYQQKPGQSPKLLIYGVSNRFSGVPDRFSGSGSGTDFTLTISSLQAEDVAVYYCFQGSHVPNTFGGGTKVEIKGS

SEQ ID NO: 33427 - protein, 5 aa, synthetic construct
  source 1..5: note = Description of Artificial Sequence: Synthetic peptide; note = XENP023617 vhCDR1
HYGMN

SEQ ID NO: 33428 - protein, 17 aa, synthetic construct
  source 1..17: note = Description of Artificial Sequence: Synthetic peptide; note = XENP023617 vhCDR2
WINTYTGEPTYADGFTG

SEQ ID NO: 33429 - protein, 8 aa, synthetic construct
  source 1..8: note = Description of Artificial Sequence: Synthetic peptide; note = XENP023617 vhCDR3
DYYGSSPY

SEQ ID NO: 33430 - protein, 16 aa, synthetic construct
  source 1..16: note = Description of Artificial Sequence: Synthetic peptide; note = XENP023617 vlCDR1
KSSQSIVHSNGNTYLE

SEQ ID NO: 33431 - protein, 7 aa, synthetic construct
  source 1..7: note = Description of Artificial Sequence: Synthetic peptide; note = XENP023617 vlCDR2
GVSNRFS

SEQ ID NO: 33432 - protein, 9 aa, synthetic construct
  source 1..9: note = Description of Artificial Sequence: Synthetic peptide; note = XENP023617 vlCDR3
FQGSHVPNT

SEQ ID NO: 33433 - protein, 251 aa, synthetic construct
  source 1..251: note = Description of Artificial Sequence: Synthetic polypeptide; note = XENP023618 1C11_H3_L3.50_scFv
QIQLVQSGSELKKPGASVKVSCKASGYTFTHYGMNWVRQAPGQGLEWMGWINTYTGEPTYADGFTGRFVFSLDTSVSTAYLQISSLKAEDTAVYFCARDYYGSSPYWGQGTLVTVSSGKPGSGKPGSGKPGSGKPGSDVLMTQSPDSLAVSLGERATINCKSSQSIVHSNGNTYLEWYQQKPGQSPKLLIYSVSNRFSGVPDRFSGSGSGTDFTLTISSLQAEDVAVYYCFQGSHVPNTFGGGTKVEIKGS

SEQ ID NO: 33434 - protein, 117 aa, synthetic construct; identical to SEQ ID NO: 33034
  source 1..117: note = Description of Artificial Sequence: Synthetic polypeptide; note = VH of XENP023618

SEQ ID NO: 33435 - protein, 114 aa, synthetic construct
  source 1..114: note = Description of Artificial Sequence: Synthetic polypeptide; note = VL of XENP023618
DVLMTQSPDSLAVSLGERATINCKSSQSIVHSNGNTYLEWYQQKPGQSPKLLIYSVSNRFSGVPDRFSGSGSGTDFTLTISSLQAEDVAVYYCFQGSHVPNTFGGGTKVEIKGS

SEQ ID NO: 33436 - protein, 5 aa, synthetic construct
  source 1..5: note = Description of Artificial Sequence: Synthetic peptide; note = XENP023618 vhCDR1
HYGMN

SEQ ID NO: 33437 - protein, 17 aa, synthetic construct
  source 1..17: note = Description of Artificial Sequence: Synthetic peptide; note = XENP023618 vhCDR2
WINTYTGEPTYADGFTG

SEQ ID NO: 33438 - protein, 8 aa, synthetic construct
  source 1..8: note = Description of Artificial Sequence: Synthetic peptide; note = XENP023618 vhCDR3
DYYGSSPY

SEQ ID NO: 33439 - protein, 16 aa, synthetic construct
  source 1..16: note = Description of Artificial Sequence: Synthetic peptide; note = XENP023618 vlCDR1
KSSQSIVHSNGNTYLE

SEQ ID NO: 33440 - protein, 7 aa, synthetic construct
  source 1..7: note = Description of Artificial Sequence: Synthetic peptide; note = XENP023618 vlCDR2
SVSNRFS

SEQ ID NO: 33441 - protein, 9 aa, synthetic construct
  source 1..9: note = Description of Artificial Sequence: Synthetic peptide; note = XENP023618 vlCDR3
FQGSHVPNT

SEQ ID NO: 33442 - protein, 251 aa, synthetic construct
  source 1..251: note = Description of Artificial Sequence: Synthetic polypeptide; note = XENP023619 1C11_H3_L3.51_scFv
QIQLVQSGSELKKPGASVKVSCKASGYTFTHYGMNWVRQAPGQGLEWMGWINTYTGEPTYADGFTGRFVFSLDTSVSTAYLQISSLKAEDTAVYFCARDYYGSSPYWGQGTLVTVSSGKPGSGKPGSGKPGSGKPGSDVLMTQSPDSLAVSLGERATINCKSSQSIVHSNGNTYLEWYQQKPGQSPKLLIYKASNRFSGVPDRFSGSGSGTDFTLTISSLQAEDVAVYYCFQGSHVPNTFGGGTKVEIKGS

SEQ ID NO: 33443 - protein, 117 aa, synthetic construct; identical to SEQ ID NO: 33034
  source 1..117: note = Description of Artificial Sequence: Synthetic polypeptide; note = VH of XENP023619

SEQ ID NO: 33444 - protein, 114 aa, synthetic construct
  source 1..114: note = Description of Artificial Sequence: Synthetic polypeptide; note = VL of XENP023619
DVLMTQSPDSLAVSLGERATINCKSSQSIVHSNGNTYLEWYQQKPGQSPKLLIYKASNRFSGVPDRFSGSGSGTDFTLTISSLQAEDVAVYYCFQGSHVPNTFGGGTKVEIKGS

SEQ ID NO: 33445 - protein, 5 aa, synthetic construct
  source 1..5: note = Description of Artificial Sequence: Synthetic peptide; note = XENP023619 vhCDR1
HYGMN

SEQ ID NO: 33446 - protein, 17 aa, synthetic construct
  source 1..17: note = Description of Artificial Sequence: Synthetic peptide; note = XENP023619 vhCDR2
WINTYTGEPTYADGFTG

SEQ ID NO: 33447 - protein, 8 aa, synthetic construct
  source 1..8: note = Description of Artificial Sequence: Synthetic peptide; note = XENP023619 vhCDR3
DYYGSSPY

SEQ ID NO: 33448 - protein, 16 aa, synthetic construct
  source 1..16: note = Description of Artificial Sequence: Synthetic peptide; note = XENP023619 vlCDR1
KSSQSIVHSNGNTYLE

SEQ ID NO: 33449 - protein, 7 aa, synthetic construct
  source 1..7: note = Description of Artificial Sequence: Synthetic peptide; note = XENP023619 vlCDR2
KASNRFS

SEQ ID NO: 33450 - protein, 9 aa, synthetic construct
  source 1..9: note = Description of Artificial Sequence: Synthetic peptide; note = XENP023619 vlCDR3
FQGSHVPNT

SEQ ID NO: 33451 - protein, 251 aa, synthetic construct
  source 1..251: note = Description of Artificial Sequence: Synthetic polypeptide; note = XENP023620 1C11_H3_L3.52_scFv
QIQLVQSGSELKKPGASVKVSCKASGYTFTHYGMNWVRQAPGQGLEWMGWINTYTGEPTYADGFTGRFVFSLDTSVSTAYLQISSLKAEDTAVYFCARDYYGSSPYWGQGTLVTVSSGKPGSGKPGSGKPGSGKPGSDVLMTQSPDSLAVSLGERATINCKSSQSIVHSNGNTYLEWYQQKPGQSPKLLIYKTSNRFSGVPDRFSGSGSGTDFTLTISSLQAEDVAVYYCFQGSHVPNTFGGGTKVEIKGS

SEQ ID NO: 33452 - protein, 117 aa, synthetic construct; identical to SEQ ID NO: 33034
  source 1..117: note = Description of Artificial Sequence: Synthetic polypeptide; note = VH of XENP023620

SEQ ID NO: 33453 - protein, 114 aa, synthetic construct
  source 1..114: note = Description of Artificial Sequence: Synthetic polypeptide; note = VL of XENP023620
DVLMTQSPDSLAVSLGERATINCKSSQSIVHSNGNTYLEWYQQKPGQSPKLLIYKTSNRFSGVPDRFSGSGSGTDFTLTISSLQAEDVAVYYCFQGSHVPNTFGGGTKVEIKGS

SEQ ID NO: 33454 - protein, 5 aa, synthetic construct
  source 1..5: note = Description of Artificial Sequence: Synthetic peptide; note = XENP023620 vhCDR1
HYGMN

SEQ ID NO: 33455 - protein, 17 aa, synthetic construct
  source 1..17: note = Description of Artificial Sequence: Synthetic peptide; note = XENP023620 vhCDR2
WINTYTGEPTYADGFTG

SEQ ID NO: 33456 - protein, 8 aa, synthetic construct
  source 1..8: note = Description of Artificial Sequence: Synthetic peptide; note = XENP023620 vhCDR3
DYYGSSPY

SEQ ID NO: 33457 - protein, 16 aa, synthetic construct
  source 1..16: note = Description of Artificial Sequence: Synthetic peptide; note = XENP023620 vlCDR1
KSSQSIVHSNGNTYLE

SEQ ID NO: 33458 - protein, 7 aa, synthetic construct
  source 1..7: note = Description of Artificial Sequence: Synthetic peptide; note = XENP023620 vlCDR2
KTSNRFS

SEQ ID NO: 33459 - protein, 9 aa, synthetic construct
  source 1..9: note = Description of Artificial Sequence: Synthetic peptide; note = XENP023620 vlCDR3
FQGSHVPNT

SEQ ID NO: 33460 - protein, 251 aa, synthetic construct
  source 1..251: note = Description of Artificial Sequence: Synthetic polypeptide; note = XENP023621 1C11_H3_L3.53_scFv
QIQLVQSGSELKKPGASVKVSCKASGYTFTHYGMNWVRQAPGQGLEWMGWINTYTGEPTYADGFTGRFVFSLDTSVSTAYLQISSLKAEDTAVYFCARDYYGSSPYWGQGTLVTVSSGKPGSGKPGSGKPGSGKPGSDVLMTQSPDSLAVSLGERATINCKSSQSIVHSNGNTYLEWYQQKPGQSPKLLIYKGSNRFSGVPDRFSGSGSGTDFTLTISSLQAEDVAVYYCFQGSHVPNTFGGGTKVEIKGS

SEQ ID NO: 33461 - protein, 117 aa, synthetic construct; identical to SEQ ID NO: 33034
  source 1..117: note = Description of Artificial Sequence: Synthetic polypeptide; note = VH of XENP023621

SEQ ID NO: 33462 - protein, 114 aa, synthetic construct
  source 1..114: note = Description of Artificial Sequence: Synthetic polypeptide; note = VL of XENP023621
DVLMTQSPDSLAVSLGERATINCKSSQSIVHSNGNTYLEWYQQKPGQSPKLLIYKGSNRFSGVPDRFSGSGSGTDFTLTISSLQAEDVAVYYCFQGSHVPNTFGGGTKVEIKGS

SEQ ID NO: 33463 - protein, 5 aa, synthetic construct
  source 1..5: note = Description of Artificial Sequence: Synthetic peptide; note = XENP023621 vhCDR1
HYGMN

SEQ ID NO: 33464 - protein, 17 aa, synthetic construct
  source 1..17: note = Description of Artificial Sequence: Synthetic peptide; note = XENP023621 vhCDR2
WINTYTGEPTYADGFTG

SEQ ID NO: 33465 - protein, 8 aa, synthetic construct
  source 1..8: note = Description of Artificial Sequence: Synthetic peptide; note = XENP023621 vhCDR3
DYYGSSPY

SEQ ID NO: 33466 - protein, 16 aa, synthetic construct
  source 1..16: note = Description of Artificial Sequence: Synthetic peptide; note = XENP023621 vlCDR1
KSSQSIVHSNGNTYLE

SEQ ID NO: 33467 - protein, 7 aa, synthetic construct
  source 1..7: note = Description of Artificial Sequence: Synthetic peptide; note = XENP023621 vlCDR2
KGSNRFS

SEQ ID NO: 33468 - protein, 9 aa, synthetic construct
  source 1..9: note = Description of Artificial Sequence: Synthetic peptide; note = XENP023621 vlCDR3
FQGSHVPNT

SEQ ID NO: 33469 - protein, 251 aa, synthetic construct
  source 1..251: note = Description of Artificial Sequence: Synthetic polypeptide; note = XENP023622 1C11_H3_L3.54_scFv
QIQLVQSGSELKKPGASVKVSCKASGYTFTHYGMNWVRQAPGQGLEWMGWINTYTGEPTYADGFTGRFVFSLDTSVSTAYLQISSLKAEDTAVYFCARDYYGSSPYWGQGTLVTVSSGKPGSGKPGSGKPGSGKPGSDVLMTQSPDSLAVSLGERATINCKSSQSIVHSNGNTYLEWYQQKPGQSPKLLIYKMSNRFSGVPDRFSGSGSGTDFTLTISSLQAEDVAVYYCFQGSHVPNTFGGGTKVEIKGS

SEQ ID NO: 33470 - protein, 117 aa, synthetic construct; identical to SEQ ID NO: 33034
  source 1..117: note = Description of Artificial Sequence: Synthetic polypeptide; note = VH of XENP023622

SEQ ID NO: 33471 - protein, 114 aa, synthetic construct
  source 1..114: note = Description of Artificial Sequence: Synthetic polypeptide; note = VL of XENP023622
DVLMTQSPDSLAVSLGERATINCKSSQSIVHSNGNTYLEWYQQKPGQSPKLLIYKMSNRFSGVPDRFSGSGSGTDFTLTISSLQAEDVAVYYCFQGSHVPNTFGGGTKVEIKGS

SEQ ID NO: 33472 - protein, 5 aa, synthetic construct
  source 1..5: note = Description of Artificial Sequence: Synthetic peptide; note = XENP023622 vhCDR1
HYGMN

SEQ ID NO: 33473 - protein, 17 aa, synthetic construct
  source 1..17: note = Description of Artificial Sequence: Synthetic peptide; note = XENP023622 vhCDR2
WINTYTGEPTYADGFTG

SEQ ID NO: 33474 - protein, 8 aa, synthetic construct
  source 1..8: note = Description of Artificial Sequence: Synthetic peptide; note = XENP023622 vhCDR3
DYYGSSPY

SEQ ID NO: 33475 - protein, 16 aa, synthetic construct
  source 1..16: note = Description of Artificial Sequence: Synthetic peptide; note = XENP023622 vlCDR1
KSSQSIVHSNGNTYLE

SEQ ID NO: 33476 - protein, 7 aa, synthetic construct
  source 1..7: note = Description of Artificial Sequence: Synthetic peptide; note = XENP023622 vlCDR2
KMSNRFS

SEQ ID NO: 33477 - protein, 9 aa, synthetic construct
  source 1..9: note = Description of Artificial Sequence: Synthetic peptide; note = XENP023622 vlCDR3
FQGSHVPNT

SEQ ID NO: 33478 - protein, 251 aa, synthetic construct
  source 1..251: note = Description of Artificial Sequence: Synthetic polypeptide; note = XENP023623 1C11_H3_L3.56_scFv
QIQLVQSGSELKKPGASVKVSCKASGYTFTHYGMNWVRQAPGQGLEWMGWINTYTGEPTYADGFTGRFVFSLDTSVSTAYLQISSLKAEDTAVYFCARDYYGSSPYWGQGTLVTVSSGKPGSGKPGSGKPGSGKPGSDVLMTQSPDSLAVSLGERATINCKSSQSIVHSNGNTYLEWYQQKPGQSPKLLIYKVSNRASGVPDRFSGSGSGTDFTLTISSLQAEDVAVYYCFQGSHVPNTFGGGTKVEIKGS

SEQ ID NO: 33479 - protein, 117 aa, synthetic construct; identical to SEQ ID NO: 33034
  source 1..117: note = Description of Artificial Sequence: Synthetic polypeptide; note = VH of XENP023623

SEQ ID NO: 33480 - protein, 114 aa, synthetic construct
  source 1..114: note = Description of Artificial Sequence: Synthetic polypeptide; note = VL of XENP023623
DVLMTQSPDSLAVSLGERATINCKSSQSIVHSNGNTYLEWYQQKPGQSPKLLIYKVSNRASGVPDRFSGSGSGTDFTLTISSLQAEDVAVYYCFQGSHVPNTFGGGTKVEIKGS

SEQ ID NO: 33481 - protein, 5 aa, synthetic construct
  source 1..5: note = Description of Artificial Sequence: Synthetic peptide; note = XENP023623 vhCDR1
HYGMN

SEQ ID NO: 33482 - protein, 17 aa, synthetic construct
  source 1..17: note = Description of Artificial Sequence: Synthetic peptide; note = XENP023623 vhCDR2
WINTYTGEPTYADGFTG

SEQ ID NO: 33483 - protein, 8 aa, synthetic construct
  source 1..8: note = Description of Artificial Sequence: Synthetic peptide; note = XENP023623 vhCDR3
DYYGSSPY

SEQ ID NO: 33484 - protein, 16 aa, synthetic construct
  source 1..16: note = Description of Artificial Sequence: Synthetic peptide; note = XENP023623 vlCDR1
KSSQSIVHSNGNTYLE

SEQ ID NO: 33485 - protein, 7 aa, synthetic construct
  source 1..7: note = Description of Artificial Sequence: Synthetic peptide; note = XENP023623 vlCDR2
KVSNRAS

SEQ ID NO: 33486 - protein, 9 aa, synthetic construct
  source 1..9: note = Description of Artificial Sequence: Synthetic peptide; note = XENP023623 vlCDR3
FQGSHVPNT

SEQ ID NO: 33487 - protein, 251 aa, synthetic construct
  source 1..251: note = Description of Artificial Sequence: Synthetic polypeptide; note = XENP023624 1C11_H3_L3.57_scFv
QIQLVQSGSELKKPGASVKVSCKASGYTFTHYGMNWVRQAPGQGLEWMGWINTYTGEPTYADGFTGRFVFSLDTSVSTAYLQISSLKAEDTAVYFCARDYYGSSPYWGQGTLVTVSSGKPGSGKPGSGKPGSGKPGSDVLMTQSPDSLAVSLGERATINCKSSQSIVHSNGNTYLEWYQQKPGQSPKLLIYKVSNRFTGVPDRFSGSGSGTDFTLTISSLQAEDVAVYYCFQGSHVPNTFGGGTKVEIKGS

SEQ ID NO: 33488 - protein, 117 aa, synthetic construct; identical to SEQ ID NO: 33034
  source 1..117: note = Description of Artificial Sequence: Synthetic polypeptide; note = VH of XENP023624

SEQ ID NO: 33489 - protein, 114 aa, synthetic construct
  source 1..114: note = Description of Artificial Sequence: Synthetic polypeptide; note = VL of XENP023624
DVLMTQSPDSLAVSLGERATINCKSSQSIVHSNGNTYLEWYQQKPGQSPKLLIYKVSNRFTGVPDRFSGSGSGTDFTLTISSLQAEDVAVYYCFQGSHVPNTFGGGTKVEIKGS

SEQ ID NO: 33490 - protein, 5 aa, synthetic construct
  source 1..5: note = Description of Artificial Sequence: Synthetic peptide; note = XENP023624 vhCDR1
HYGMN

SEQ ID NO: 33491 - protein, 17 aa, synthetic construct
  source 1..17: note = Description of Artificial Sequence: Synthetic peptide; note = XENP023624 vhCDR2
WINTYTGEPTYADGFTG

SEQ ID NO: 33492 - protein, 8 aa, synthetic construct
  source 1..8: note = Description of Artificial Sequence: Synthetic peptide; note = XENP023624 vhCDR3
DYYGSSPY

SEQ ID NO: 33493 - protein, 16 aa, synthetic construct
  source 1..16: note = Description of Artificial Sequence: Synthetic peptide; note = XENP023624 vlCDR1
KSSQSIVHSNGNTYLE

SEQ ID NO: 33494 - protein, 7 aa, synthetic construct
  source 1..7: note = Description of Artificial Sequence: Synthetic peptide; note = XENP023624 vlCDR2
KVSNRFT

SEQ ID NO: 33495 - protein, 9 aa, synthetic construct
  source 1..9: note = Description of Artificial Sequence: Synthetic peptide; note = XENP023624 vlCDR3
FQGSHVPNT

SEQ ID NO: 33496 - protein, 251 aa, synthetic construct
  source 1..251: note = Description of Artificial Sequence: Synthetic polypeptide; note = XENP023625 1C11_H3_L3.58_scFv
QIQLVQSGSELKKPGASVKVSCKASGYTFTHYGMNWVRQAPGQGLEWMGWINTYTGEPTYADGFTGRFVFSLDTSVSTAYLQISSLKAEDTAVYFCARDYYGSSPYWGQGTLVTVSSGKPGSGKPGSGKPGSGKPGSDVLMTQSPDSLAVSLGERATINCKSSQSIVHSNGNTYLEWYQQKPGQSPKLLIYKVSNRFSGVPDRFSGSGSGTDFTLTISGLQAEDVAVYYCFQGSHVPNTFGGGTKVEIKGS

SEQ ID NO: 33497 - protein, 117 aa, synthetic construct; identical to SEQ ID NO: 33034
  source 1..117: note = Description of Artificial Sequence: Synthetic polypeptide; note = VH of XENP023625

SEQ ID NO: 33498 - protein, 114 aa, synthetic construct
  source 1..114: note = Description of Artificial Sequence: Synthetic polypeptide; note = VL of XENP023625
DVLMTQSPDSLAVSLGERATINCKSSQSIVHSNGNTYLEWYQQKPGQSPKLLIYKVSNRFSGVPDRFSGSGSGTDFTLTISGLQAEDVAVYYCFQGSHVPNTFGGGTKVEIKGS

SEQ ID NO: 33499 - protein, 5 aa, synthetic construct
  source 1..5: note = Description of Artificial Sequence: Synthetic peptide; note = XENP023625 vhCDR1
HYGMN

SEQ ID NO: 33500 - protein, 17 aa, synthetic construct
  source 1..17: note = Description of Artificial Sequence: Synthetic peptide; note = XENP023625 vhCDR2
WINTYTGEPTYADGFTG

SEQ ID NO: 33501 - protein, 8 aa, synthetic construct
  source 1..8: note = Description of Artificial Sequence: Synthetic peptide; note = XENP023625 vhCDR3
DYYGSSPY

SEQ ID NO: 33502 - protein, 16 aa, synthetic construct
  source 1..16: note = Description of Artificial Sequence: Synthetic peptide; note = XENP023625 vlCDR1
KSSQSIVHSNGNTYLE

SEQ ID NO: 33503 - protein, 7 aa, synthetic construct
  source 1..7: note = Description of Artificial Sequence: Synthetic peptide; note = XENP023625 vlCDR2
KVSNRFS

SEQ ID NO: 33504 - protein, 9 aa, synthetic construct
  source 1..9: note = Description of Artificial Sequence: Synthetic peptide; note = XENP023625 vlCDR3
FQGSHVPNT

SEQ ID NO: 33505 - protein, 251 aa, synthetic construct
  source 1..251: note = Description of Artificial Sequence: Synthetic polypeptide; note = XENP023626 1C11_H3_L3.59_scFv
QIQLVQSGSELKKPGASVKVSCKASGYTFTHYGMNWVRQAPGQGLEWMGWINTYTGEPTYADGFTGRFVFSLDTSVSTAYLQISSLKAEDTAVYFCARDYYGSSPYWGQGTLVTVSSGKPGSGKPGSGKPGSGKPGSDVLMTQSPDSLAVSLGERATINCKSSQSIVHSNGNTYLEWYQQKPGQSPKLLIYKVSNRFSGVPDRFSGSGSGTDFTLTISRLQAEDVAVYYCFQGSHVPNTFGGGTKVEIKGS

SEQ ID NO: 33506 - protein, 117 aa, synthetic construct; identical to SEQ ID NO: 33034
  source 1..117: note = Description of Artificial Sequence: Synthetic polypeptide; note = VH of XENP023626

SEQ ID NO: 33507 - protein, 114 aa, synthetic construct
  source 1..114: note = Description of Artificial Sequence: Synthetic polypeptide; note = VL of XENP023626
DVLMTQSPDSLAVSLGERATINCKSSQSIVHSNGNTYLEWYQQKPGQSPKLLIYKVSNRFSGVPDRFSGSGSGTDFTLTISRLQAEDVAVYYCFQGSHVPNTFGGGTKVEIKGS

SEQ ID NO: 33508 - protein, 5 aa, synthetic construct
  source 1..5: note = Description of Artificial Sequence: Synthetic peptide; note = XENP023626 vhCDR1
HYGMN

SEQ ID NO: 33509 - protein, 17 aa, synthetic construct
  source 1..17: note = Description of Artificial Sequence: Synthetic peptide; note = XENP023626 vhCDR2
WINTYTGEPTYADGFTG

SEQ ID NO: 33510 - protein, 8 aa, synthetic construct
  source 1..8: note = Description of Artificial Sequence: Synthetic peptide; note = XENP023626 vhCDR3
DYYGSSPY

SEQ ID NO: 33511 - protein, 16 aa, synthetic construct
  source 1..16: note = Description of Artificial Sequence: Synthetic peptide; note = XENP023626 vlCDR1
KSSQSIVHSNGNTYLE

SEQ ID NO: 33512 - protein, 7 aa, synthetic construct
  source 1..7: note = Description of Artificial Sequence: Synthetic peptide; note = XENP023626 vlCDR2
KVSNRFS

SEQ ID NO: 33513 - protein, 9 aa, synthetic construct
  source 1..9: note = Description of Artificial Sequence: Synthetic peptide; note = XENP023626 vlCDR3
FQGSHVPNT

SEQ ID NO: 33514 - protein, 251 aa, synthetic construct
  source 1..251: note = Description of Artificial Sequence: Synthetic polypeptide; note = XENP023627 1C11_H3_L3.60_scFv
QIQLVQSGSELKKPGASVKVSCKASGYTFTHYGMNWVRQAPGQGLEWMGWINTYTGEPTYADGFTGRFVFSLDTSVSTAYLQISSLKAEDTAVYFCARDYYGSSPYWGQGTLVTVSSGKPGSGKPGSGKPGSGKPGSDVLMTQSPDSLAVSLGERATINCKSSQSIVHSNGNTYLEWYQQKPGQSPKLLIYKVSNRFSGVPDRFSGSGSGTDFTLTISNLQAEDVAVYYCFQGSHVPNTFGGGTKVEIKGS

SEQ ID NO: 33515 - protein, 117 aa, synthetic construct; identical to SEQ ID NO: 33034
  source 1..117: note = Description of Artificial Sequence: Synthetic polypeptide; note = VH of XENP023627

SEQ ID NO: 33516 - protein, 114 aa, synthetic construct
  source 1..114: note = Description of Artificial Sequence: Synthetic polypeptide; note = VL of XENP023627
DVLMTQSPDSLAVSLGERATINCKSSQSIVHSNGNTYLEWYQQKPGQSPKLLIYKVSNRFSGVPDRFSGSGSGTDFTLTISNLQAEDVAVYYCFQGSHVPNTFGGGTKVEIKGS

SEQ ID NO: 33517 - protein, 5 aa, synthetic construct
  source 1..5: note = Description of Artificial Sequence: Synthetic peptide; note = XENP023627 vhCDR1
HYGMN

SEQ ID NO: 33518 - protein, 17 aa, synthetic construct
  source 1..17: note = Description of Artificial Sequence: Synthetic peptide; note = XENP023627 vhCDR2
WINTYTGEPTYADGFTG

SEQ ID NO: 33519 - protein, 8 aa, synthetic construct
  source 1..8: note = Description of Artificial Sequence: Synthetic peptide; note = XENP023627 vhCDR3
DYYGSSPY

SEQ ID NO: 33520 - protein, 16 aa, synthetic construct
  source 1..16: note = Description of Artificial Sequence: Synthetic peptide; note = XENP023627 vlCDR1
KSSQSIVHSNGNTYLE

SEQ ID NO: 33521 - protein, 7 aa, synthetic construct
  source 1..7: note = Description of Artificial Sequence: Synthetic peptide; note = XENP023627 vlCDR2
KVSNRFS

SEQ ID NO: 33522 - protein, 9 aa, synthetic construct
  source 1..9: note = Description of Artificial Sequence: Synthetic peptide; note = XENP023627 vlCDR3
FQGSHVPNT

SEQ ID NO: 33523 - protein, 251 aa, synthetic construct
  source 1..251: note = Description of Artificial Sequence: Synthetic polypeptide; note = XENP023628 1C11_H3_L3.62_scFv
QIQLVQSGSELKKPGASVKVSCKASGYTFTHYGMNWVRQAPGQGLEWMGWINTYTGEPTYADGFTGRFVFSLDTSVSTAYLQISSLKAEDTAVYFCARDYYGSSPYWGQGTLVTVSSGKPGSGKPGSGKPGSGKPGSDVLMTQSPDSLAVSLGERATINCKSSQSIVHSNGNTYLEWYQQKPGQSPKLLIYKVSNRFSGVPDRFSGSGSGTDFTLTISSMQAEDVAVYYCFQGSHVPNTFGGGTKVEIKGS

SEQ ID NO: 33524 - protein, 117 aa, synthetic construct; identical to SEQ ID NO: 33034
  source 1..117: note = Description of Artificial Sequence: Synthetic polypeptide; note = VH of XENP023628

SEQ ID NO: 33525 - protein, 114 aa, synthetic construct
  source 1..114: note = Description of Artificial Sequence: Synthetic polypeptide; note = VL of XENP023628
DVLMTQSPDSLAVSLGERATINCKSSQSIVHSNGNTYLEWYQQKPGQSPKLLIYKVSNRFSGVPDRFSGSGSGTDFTLTISSMQAEDVAVYYCFQGSHVPNTFGGGTKVEIKGS

SEQ ID NO: 33526 - protein, 5 aa, synthetic construct
  source 1..5: note = Description of Artificial Sequence: Synthetic peptide; note = XENP023628 vhCDR1
HYGMN

SEQ ID NO: 33527 - protein, 17 aa, synthetic construct
  source 1..17: note = Description of Artificial Sequence: Synthetic peptide; note = XENP023628 vhCDR2
WINTYTGEPTYADGFTG

SEQ ID NO: 33528 - protein, 8 aa, synthetic construct
  source 1..8: note = Description of Artificial Sequence: Synthetic peptide; note = XENP023628 vhCDR3
DYYGSSPY

SEQ ID NO: 33529 - protein, 16 aa, synthetic construct
  source 1..16: note = Description of Artificial Sequence: Synthetic peptide; note = XENP023628 vlCDR1
KSSQSIVHSNGNTYLE

SEQ ID NO: 33530 - protein, 7 aa, synthetic construct
  source 1..7: note = Description of Artificial Sequence: Synthetic peptide; note = XENP023628 vlCDR2
KVSNRFS

SEQ ID NO: 33531 - protein, 9 aa, synthetic construct
  source 1..9: note = Description of Artificial Sequence: Synthetic peptide; note = XENP023628 vlCDR3
FQGSHVPNT

SEQ ID NO: 33532 - protein, 251 aa, synthetic construct
  source 1..251: note = Description of Artificial Sequence: Synthetic polypeptide; note = XENP023629 1C11_H3_L3.63_scFv
QIQLVQSGSELKKPGASVKVSCKASGYTFTHYGMNWVRQAPGQGLEWMGWINTYTGEPTYADGFTGRFVFSLDTSVSTAYLQISSLKAEDTAVYFCARDYYGSSPYWGQGTLVTVSSGKPGSGKPGSGKPGSGKPGSDVLMTQSPDSLAVSLGERATINCKSSQSIVHSNGNTYLEWYQQKPGQSPKLLIYKVSNRFSGVPDRFSGSGSGTDFTLTISSVQAEDVAVYYCFQGSHVPNTFGGGTKVEIKGS

SEQ ID NO: 33533 - protein, 117 aa, synthetic construct; identical to SEQ ID NO: 33034
  source 1..117: note = Description of Artificial Sequence: Synthetic polypeptide; note = VH of XENP023629

SEQ ID NO: 33534 - protein, 114 aa, synthetic construct
  source 1..114: note = Description of Artificial Sequence: Synthetic polypeptide; note = VL of XENP023629
DVLMTQSPDSLAVSLGERATINCKSSQSIVHSNGNTYLEWYQQKPGQSPKLLIYKVSNRFSGVPDRFSGSGSGTDFTLTISSVQAEDVAVYYCFQGSHVPNTFGGGTKVEIKGS

SEQ ID NO: 33535 - protein, 5 aa, synthetic construct
  source 1..5: note = Description of Artificial Sequence: Synthetic peptide; note = XENP023629 vhCDR1
HYGMN

SEQ ID NO: 33536 - protein, 17 aa, synthetic construct
  source 1..17: note = Description of Artificial Sequence: Synthetic peptide; note = XENP023629 vhCDR2
WINTYTGEPTYADGFTG

SEQ ID NO: 33537 - protein, 8 aa, synthetic construct
  source 1..8: note = Description of Artificial Sequence: Synthetic peptide; note = XENP023629 vhCDR3
DYYGSSPY

SEQ ID NO: 33538 - protein, 16 aa, synthetic construct
  source 1..16: note = Description of Artificial Sequence: Synthetic peptide; note = XENP023629 vlCDR1
KSSQSIVHSNGNTYLE

SEQ ID NO: 33539 - protein, 7 aa, synthetic construct
  source 1..7: note = Description of Artificial Sequence: Synthetic peptide; note = XENP023629 vlCDR2
KVSNRFS

SEQ ID NO: 33540 - protein, 9 aa, synthetic construct
  source 1..9: note = Description of Artificial Sequence: Synthetic peptide; note = XENP023629 vlCDR3
FQGSHVPNT

SEQ ID NO: 33541 - protein, 251 aa, synthetic construct
  source 1..251: note = Description of Artificial Sequence: Synthetic polypeptide; note = XENP023630 1C11_H3_L3.64_scFv
QIQLVQSGSELKKPGASVKVSCKASGYTFTHYGMNWVRQAPGQGLEWMGWINTYTGEPTYADGFTGRFVFSLDTSVSTAYLQISSLKAEDTAVYFCARDYYGSSPYWGQGTLVTVSSGKPGSGKPGSGKPGSGKPGSDVLMTQSPDSLAVSLGERATINCKSSQSIVHSNGNTYLEWYQQKPGQSPKLLIYKVSNRFSGVPDRFSGSGSGTDFTLTISSAQAEDVAVYYCFQGSHVPNTFGGGTKVEIKGS

SEQ ID NO: 33542 - protein, 117 aa, synthetic construct; identical to SEQ ID NO: 33034
  source 1..117: note = Description of Artificial Sequence: Synthetic polypeptide; note = VH of XENP023630

SEQ ID NO: 33543 - protein, 114 aa, synthetic construct
  source 1..114: note = Description of Artificial Sequence: Synthetic polypeptide; note = VL of XENP023630
DVLMTQSPDSLAVSLGERATINCKSSQSIVHSNGNTYLEWYQQKPGQSPKLLIYKVSNRFSGVPDRFSGSGSGTDFTLTISSAQAEDVAVYYCFQGSHVPNTFGGGTKVEIKGS

SEQ ID NO: 33544 - protein, 5 aa, synthetic construct
  source 1..5: note = Description of Artificial Sequence: Synthetic peptide; note = XENP023630 vhCDR1
HYGMN

SEQ ID NO: 33545 - protein, 17 aa, synthetic construct
  source 1..17: note = Description of Artificial Sequence: Synthetic peptide; note = XENP023630 vhCDR2
WINTYTGEPTYADGFTG

SEQ ID NO: 33546 - protein, 8 aa, synthetic construct
  source 1..8: note = Description of Artificial Sequence: Synthetic peptide; note = XENP023630 vhCDR3
DYYGSSPY

SEQ ID NO: 33547 - protein, 16 aa, synthetic construct
  source 1..16: note = Description of Artificial Sequence: Synthetic peptide; note = XENP023630 vlCDR1
KSSQSIVHSNGNTYLE

SEQ ID NO: 33548 - protein, 7 aa, synthetic construct
  source 1..7: note = Description of Artificial Sequence: Synthetic peptide; note = XENP023630 vlCDR2
KVSNRFS

SEQ ID NO: 33549 - protein, 9 aa, synthetic construct
  source 1..9: note = Description of Artificial Sequence: Synthetic peptide; note = XENP023630 vlCDR3
FQGSHVPNT

SEQ ID NO: 33550 - protein, 251 aa, synthetic construct
  source 1..251: note = Description of Artificial Sequence: Synthetic polypeptide; note = XENP023631 1C11_H3_L3.65_scFv
QIQLVQSGSELKKPGASVKVSCKASGYTFTHYGMNWVRQAPGQGLEWMGWINTYTGEPTYADGFTGRFVFSLDTSVSTAYLQISSLKAEDTAVYFCARDYYGSSPYWGQGTLVTVSSGKPGSGKPGSGKPGSGKPGSDVLMTQSPDSLAVSLGERATINCKSSQSIVHSNGNTYLEWYQQKPGQSPKLLIYKVSNRFSGVPDRFSGSGSGTDFTLTISSLEAEDVAVYYCFQGSHVPNTFGGGTKVEIKGS

SEQ ID NO: 33551 - protein, 117 aa, synthetic construct; identical to SEQ ID NO: 33034
  source 1..117: note = Description of Artificial Sequence: Synthetic polypeptide; note = VH of XENP023631

SEQ ID NO: 33552 - protein, 114 aa, synthetic construct
  source 1..114: note = Description of Artificial Sequence: Synthetic polypeptide; note = VL of XENP023631
DVLMTQSPDSLAVSLGERATINCKSSQSIVHSNGNTYLEWYQQKPGQSPKLLIYKVSNRFSGVPDRFSGSGSGTDFTLTISSLEAEDVAVYYCFQGSHVPNTFGGGTKVEIKGS

SEQ ID NO: 33553 - protein, 5 aa, synthetic construct
  source 1..5: note = Description of Artificial Sequence: Synthetic peptide; note = XENP023631 vhCDR1
HYGMN

SEQ ID NO: 33554 - protein, 17 aa, synthetic construct
  source 1..17: note = Description of Artificial Sequence: Synthetic peptide; note = XENP023631 vhCDR2
WINTYTGEPTYADGFTG

SEQ ID NO: 33555 - protein, 8 aa, synthetic construct
  source 1..8: note = Description of Artificial Sequence: Synthetic peptide; note = XENP023631 vhCDR3
DYYGSSPY

SEQ ID NO: 33556 - protein, 16 aa, synthetic construct
  source 1..16: note = Description of Artificial Sequence: Synthetic peptide; note = XENP023631 vlCDR1
KSSQSIVHSNGNTYLE

SEQ ID NO: 33557 - protein, 7 aa, synthetic construct
  source 1..7: note = Description of Artificial Sequence: Synthetic peptide; note = XENP023631 vlCDR2
KVSNRFS

SEQ ID NO: 33558 - protein, 9 aa, synthetic construct
  source 1..9: note = Description of Artificial Sequence: Synthetic peptide; note = XENP023631 vlCDR3
FQGSHVPNT

SEQ ID NO: 33559 - protein, 251 aa, synthetic construct
  source 1..251: note = Description of Artificial Sequence: Synthetic polypeptide; note = XENP023632 1C11_H3_L3.66_scFv
QIQLVQSGSELKKPGASVKVSCKASGYTFTHYGMNWVRQAPGQGLEWMGWINTYTGEPTYADGFTGRFVFSLDTSVSTAYLQISSLKAEDTAVYFCARDYYGSSPYWGQGTLVTVSSGKPGSGKPGSGKPGSGKPGSDVLMTQSPDSLAVSLGERATINCKSSQSIVHSNGNTYLEWYQQKPGQSPKLLIYKVSNRFSGVPDRFSGSGSGTDFTLTISSLQPEDVAVYYCFQGSHVPNTFGGGTKVEIKGS

SEQ ID NO: 33560 - protein, 117 aa, synthetic construct; identical to SEQ ID NO: 33034
  source 1..117: note = Description of Artificial Sequence: Synthetic polypeptide; note = VH of XENP023632

SEQ ID NO: 33561 - protein, 114 aa, synthetic construct
  source 1..114: note = Description of Artificial Sequence: Synthetic polypeptide; note = VL of XENP023632
DVLMTQSPDSLAVSLGERATINCKSSQSIVHSNGNTYLEWYQQKPGQSPKLLIYKVSNRFSGVPDRFSGSGSGTDFTLTISSLQPEDVAVYYCFQGSHVPNTFGGGTKVEIKGS

SEQ ID NO: 33562 - protein, 5 aa, synthetic construct
  source 1..5: note = Description of Artificial Sequence: Synthetic peptide; note = XENP023632 vhCDR1
HYGMN

SEQ ID NO: 33563 - protein, 17 aa, synthetic construct
  source 1..17: note = Description of Artificial Sequence: Synthetic peptide; note = XENP023632 vhCDR2
WINTYTGEPTYADGFTG

SEQ ID NO: 33564 - protein, 8 aa, synthetic construct
  source 1..8: note = Description of Artificial Sequence: Synthetic peptide; note = XENP023632 vhCDR3
DYYGSSPY

SEQ ID NO: 33565 - protein, 16 aa, synthetic construct
  source 1..16: note = Description of Artificial Sequence: Synthetic peptide; note = XENP023632 vlCDR1
KSSQSIVHSNGNTYLE

SEQ ID NO: 33566 - protein, 7 aa, synthetic construct
  source 1..7: note = Description of Artificial Sequence: Synthetic peptide; note = XENP023632 vlCDR2
KVSNRFS

SEQ ID NO: 33567 - protein, 9 aa, synthetic construct
  source 1..9: note = Description of Artificial Sequence: Synthetic peptide; note = XENP023632 vlCDR3
FQGSHVPNT

SEQ ID NO: 33568 - protein, 251 aa, synthetic construct
  source 1..251: note = Description of Artificial Sequence: Synthetic polypeptide; note = XENP023633 1C11_H3_L3.69_scFv
QIQLVQSGSELKKPGASVKVSCKASGYTFTHYGMNWVRQAPGQGLEWMGWINTYTGEPTYADGFTGRFVFSLDTSVSTAYLQISSLKAEDTAVYFCARDYYGSSPYWGQGTLVTVSSGKPGSGKPGSGKPGSGKPGSDVLMTQSPDSLAVSLGERATINCKSSQSIVHSNGNTYLEWYQQKPGQSPKLLIYKVSNRFSGVPDRFSGSGSGTDFTLTISSLQAEDAAVYYCFQGSHVPNTFGGGTKVEIKGS

SEQ ID NO: 33569 - protein, 117 aa, synthetic construct; identical to SEQ ID NO: 33034
  source 1..117: note = Description of Artificial Sequence: Synthetic polypeptide; note = VH of XENP023633

SEQ ID NO: 33570 - protein, 114 aa, synthetic construct
  source 1..114: note = Description of Artificial Sequence: Synthetic polypeptide; note = VL of XENP023633
DVLMTQSPDSLAVSLGERATINCKSSQSIVHSNGNTYLEWYQQKPGQSPKLLIYKVSNRFSGVPDRFSGSGSGTDFTLTISSLQAEDAAVYYCFQGSHVPNTFGGGTKVEIKGS

SEQ ID NO: 33571 - protein, 5 aa, synthetic construct
  source 1..5: note = Description of Artificial Sequence: Synthetic peptide; note = XENP023633 vhCDR1
HYGMN

SEQ ID NO: 33572 - protein, 17 aa, synthetic construct
  source 1..17: note = Description of Artificial Sequence: Synthetic peptide; note = XENP023633 vhCDR2
WINTYTGEPTYADGFTG

SEQ ID NO: 33573 - protein, 8 aa, synthetic construct
  source 1..8: note = Description of Artificial Sequence: Synthetic peptide; note = XENP023633 vhCDR3
DYYGSSPY

SEQ ID NO: 33574 - protein, 16 aa, synthetic construct
  source 1..16: note = Description of Artificial Sequence: Synthetic peptide; note = XENP023633 vlCDR1
KSSQSIVHSNGNTYLE

SEQ ID NO: 33575 - protein, 7 aa, synthetic construct
  source 1..7: note = Description of Artificial Sequence: Synthetic peptide; note = XENP023633 vlCDR2
KVSNRFS

SEQ ID NO: 33576 - protein, 9 aa, synthetic construct
  source 1..9: note = Description of Artificial Sequence: Synthetic peptide; note = XENP023633 vlCDR3
FQGSHVPNT

SEQ ID NO: 33577 - protein, 251 aa, synthetic construct
  source 1..251: note = Description of Artificial Sequence: Synthetic polypeptide; note = XENP023634 1C11_H3_L3.70_scFv
QIQLVQSGSELKKPGASVKVSCKASGYTFTHYGMNWVRQAPGQGLEWMGWINTYTGEPTYADGFTGRFVFSLDTSVSTAYLQISSLKAEDTAVYFCARDYYGSSPYWGQGTLVTVSSGKPGSGKPGSGKPGSGKPGSDVLMTQSPDSLAVSLGERATINCKSSQSIVHSNGNTYLEWYQQKPGQSPKLLIYKVSNRFSGVPDRFSGSGSGTDFTLTISSLQAEDFAVYYCFQGSHVPNTFGGGTKVEIKGS

SEQ ID NO: 33578 - protein, 117 aa, synthetic construct; identical to SEQ ID NO: 33034
  source 1..117: note = Description of Artificial Sequence: Synthetic polypeptide; note = VH of XENP023634

SEQ ID NO: 33579 - protein, 114 aa, synthetic construct
  source 1..114: note = Description of Artificial Sequence: Synthetic polypeptide; note = VL of XENP023634
DVLMTQSPDSLAVSLGERATINCKSSQSIVHSNGNTYLEWYQQKPGQSPKLLIYKVSNRFSGVPDRFSGSGSGTDFTLTISSLQAEDFAVYYCFQGSHVPNTFGGGTKVEIKGS

SEQ ID NO: 33580 - protein, 5 aa, synthetic construct
  source 1..5: note = Description of Artificial Sequence: Synthetic peptide; note = XENP023634 vhCDR1
HYGMN

SEQ ID NO: 33581 - protein, 17 aa, synthetic construct
  source 1..17: note = Description of Artificial Sequence: Synthetic peptide; note = XENP023634 vhCDR2
WINTYTGEPTYADGFTG

SEQ ID NO: 33582 - protein, 8 aa, synthetic construct
  source 1..8: note = Description of Artificial Sequence: Synthetic peptide; note = XENP023634 vhCDR3
DYYGSSPY

SEQ ID NO: 33583 - protein, 16 aa, synthetic construct
  source 1..16: note = Description of Artificial Sequence: Synthetic peptide; note = XENP023634 vlCDR1
KSSQSIVHSNGNTYLE

SEQ ID NO: 33584 - protein, 7 aa, synthetic construct
  source 1..7: note = Description of Artificial Sequence: Synthetic peptide; note = XENP023634 vlCDR2
KVSNRFS

SEQ ID NO: 33585 - protein, 9 aa, synthetic construct
  source 1..9: note = Description of Artificial Sequence: Synthetic peptide; note = XENP023634 vlCDR3
FQGSHVPNT

SEQ ID NO: 33586 - protein, 251 aa, synthetic construct
  source 1..251: note = Description of Artificial Sequence: Synthetic polypeptide; note = XENP023635 1C11_H3_L3.72_scFv
QIQLVQSGSELKKPGASVKVSCKASGYTFTHYGMNWVRQAPGQGLEWMGWINTYTGEPTYADGFTGRFVFSLDTSVSTAYLQISSLKAEDTAVYFCARDYYGSSPYWGQGTLVTVSSGKPGSGKPGSGKPGSGKPGSDVLMTQSPDSLAVSLGERATINCKSSQSIVHSNGNTYLEWYQQKPGQSPKLLIYKVSNRFSGVPDRFSGSGSGTDFTLTISSLQAEDVADYYCFQGSHVPNTFGGGTKVEIKGS

SEQ ID NO: 33587 - protein, 117 aa, synthetic construct; identical to SEQ ID NO: 33034
  source 1..117: note = Description of Artificial Sequence: Synthetic polypeptide; note = VH of XENP023635

SEQ ID NO: 33588 - protein, 114 aa, synthetic construct
  source 1..114: note = Description of Artificial Sequence: Synthetic polypeptide; note = VL of XENP023635
DVLMTQSPDSLAVSLGERATINCKSSQSIVHSNGNTYLEWYQQKPGQSPKLLIYKVSNRFSGVPDRFSGSGSGTDFTLTISSLQAEDVADYYCFQGSHVPNTFGGGTKVEIKGS

SEQ ID NO: 33589 - protein, 5 aa, synthetic construct
  source 1..5: note = Description of Artificial Sequence: Synthetic peptide; note = XENP023635 vhCDR1
HYGMN

SEQ ID NO: 33590 - protein, 17 aa, synthetic construct
  source 1..17: note = Description of Artificial Sequence: Synthetic peptide; note = XENP023635 vhCDR2
WINTYTGEPTYADGFTG

SEQ ID NO: 33591 - protein, 8 aa, synthetic construct
  source 1..8: note = Description of Artificial Sequence: Synthetic peptide; note = XENP023635 vhCDR3
DYYGSSPY

SEQ ID NO: 33592 - protein, 16 aa, synthetic construct
  source 1..16: note = Description of Artificial Sequence: Synthetic peptide; note = XENP023635 vlCDR1
KSSQSIVHSNGNTYLE

SEQ ID NO: 33593 - protein, 7 aa, synthetic construct
  source 1..7: note = Description of Artificial Sequence: Synthetic peptide; note = XENP023635 vlCDR2
KVSNRFS

SEQ ID NO: 33594 - protein, 9 aa, synthetic construct
  source 1..9: note = Description of Artificial Sequence: Synthetic peptide; note = XENP023635 vlCDR3
FQGSHVPNT

SEQ ID NO: 33595 - protein, 251 aa, synthetic construct
  source 1..251: note = Description of Artificial Sequence: Synthetic polypeptide; note = XENP023636 1C11_H3_L3.73_scFv
QIQLVQSGSELKKPGASVKVSCKASGYTFTHYGMNWVRQAPGQGLEWMGWINTYTGEPTYADGFTGRFVFSLDTSVSTAYLQISSLKAEDTAVYFCARDYYGSSPYWGQGTLVTVSSGKPGSGKPGSGKPGSGKPGSDVLMTQSPDSLAVSLGERATINCKSSQSIVHSNGNTYLEWYQQKPGQSPKLLIYKVSNRFSGVPDRFSGSGSGTDFTLTISSLQAEDVATYYCFQGSHVPNTFGGGTKVEIKGS

SEQ ID NO: 33596 - protein, 117 aa, synthetic construct; identical to SEQ ID NO: 33034
  source 1..117: note = Description of Artificial Sequence: Synthetic polypeptide; note = VH of XENP023636

SEQ ID NO: 33597 - protein, 114 aa, synthetic construct
  source 1..114: note = Description of Artificial Sequence: Synthetic polypeptide; note = VL of XENP023636
DVLMTQSPDSLAVSLGERATINCKSSQSIVHSNGNTYLEWYQQKPGQSPKLLIYKVSNRFSGVPDRFSGSGSGTDFTLTISSLQAEDVATYYCFQGSHVPNTFGGGTKVEIKGS

SEQ ID NO: 33598 - protein, 5 aa, synthetic construct
  source 1..5: note = Description of Artificial Sequence: Synthetic peptide; note = XENP023636 vhCDR1
HYGMN

SEQ ID NO: 33599 - protein, 17 aa, synthetic construct
  source 1..17: note = Description of Artificial Sequence: Synthetic peptide; note = XENP023636 vhCDR2
WINTYTGEPTYADGFTG

SEQ ID NO: 33600 - protein, 8 aa, synthetic construct
  source 1..8: note = Description of Artificial Sequence: Synthetic peptide; note = XENP023636 vhCDR3
DYYGSSPY

SEQ ID NO: 33601 - protein, 16 aa, synthetic construct
  source 1..16: note = Description of Artificial Sequence: Synthetic peptide; note = XENP023636 vlCDR1
KSSQSIVHSNGNTYLE

SEQ ID NO: 33602 - protein, 7 aa, synthetic construct
  source 1..7: note = Description of Artificial Sequence: Synthetic peptide; note = XENP023636 vlCDR2
KVSNRFS

SEQ ID NO: 33603 - protein, 9 aa, synthetic construct
  source 1..9: note = Description of Artificial Sequence: Synthetic peptide; note = XENP023636 vlCDR3
FQGSHVPNT

SEQ ID NO: 33604 - protein, 251 aa, synthetic construct
  source 1..251: note = Description of Artificial Sequence: Synthetic polypeptide; note = XENP023637 1C11_H3_L3.75_scFv
QIQLVQSGSELKKPGASVKVSCKASGYTFTHYGMNWVRQAPGQGLEWMGWINTYTGEPTYADGFTGRFVFSLDTSVSTAYLQISSLKAEDTAVYFCARDYYGSSPYWGQGTLVTVSSGKPGSGKPGSGKPGSGKPGSDVLMTQSPDSLAVSLGERATINCKSSQSIVHSNGNTYLEWYQQKPGQSPKLLIYKVSNRFSGVPDRFSGSGSGTDFTLTISSLQAEDVAVYYCLQGSHVPNTFGGGTKVEIKGS

SEQ ID NO: 33605 - protein, 117 aa, synthetic construct; identical to SEQ ID NO: 33034
  source 1..117: note = Description of Artificial Sequence: Synthetic polypeptide; note = VH of XENP023637

SEQ ID NO: 33606 - protein, 114 aa, synthetic construct
  source 1..114: note = Description of Artificial Sequence: Synthetic polypeptide; note = VL of XENP023637
DVLMTQSPDSLAVSLGERATINCKSSQSIVHSNGNTYLEWYQQKPGQSPKLLIYKVSNRFSGVPDRFSGSGSGTDFTLTISSLQAEDVAVYYCLQGSHVPNTFGGGTKVEIKGS

SEQ ID NO: 33607 - protein, 5 aa, synthetic construct
  source 1..5: note = Description of Artificial Sequence: Synthetic peptide; note = XENP023637 vhCDR1
HYGMN

SEQ ID NO: 33608 - protein, 17 aa, synthetic construct
  source 1..17: note = Description of Artificial Sequence: Synthetic peptide; note = XENP023637 vhCDR2
WINTYTGEPTYADGFTG

SEQ ID NO: 33609 - protein, 8 aa, synthetic construct
  source 1..8: note = Description of Artificial Sequence: Synthetic peptide; note = XENP023637 vhCDR3
DYYGSSPY

SEQ ID NO: 33610 - protein, 16 aa, synthetic construct
  source 1..16: note = Description of Artificial Sequence: Synthetic peptide; note = XENP023637 vlCDR1
KSSQSIVHSNGNTYLE

SEQ ID NO: 33611 - protein, 7 aa, synthetic construct
  source 1..7: note = Description of Artificial Sequence: Synthetic peptide; note = XENP023637 vlCDR2
KVSNRFS

SEQ ID NO: 33612 - protein, 9 aa, synthetic construct
  source 1..9: note = Description of Artificial Sequence: Synthetic peptide; note = XENP023637 vlCDR3
LQGSHVPNT

SEQ ID NO: 33613 - protein, 251 aa, synthetic construct
  source 1..251: note = Description of Artificial Sequence: Synthetic polypeptide; note = XENP023638 1C11_H3_L3.78_scFv
QIQLVQSGSELKKPGASVKVSCKASGYTFTHYGMNWVRQAPGQGLEWMGWINTYTGEPTYADGFTGRFVFSLDTSVSTAYLQISSLKAEDTAVYFCARDYYGSSPYWGQGTLVTVSSGKPGSGKPGSGKPGSGKPGSDVLMTQSPDSLAVSLGERATINCKSSQSIVHSNGNTYLEWYQQKPGQSPKLLIYKVSNRFSGVPDRFSGSGSGTDFTLTISSLQAEDVAVYYCFQGSHVGNTFGGGTKVEIKGS

SEQ ID NO: 33614 - protein, 117 aa, synthetic construct; identical to SEQ ID NO: 33034
  source 1..117: note = Description of Artificial Sequence: Synthetic polypeptide; note = VH of XENP023638

SEQ ID NO: 33615 - protein, 114 aa, synthetic construct
  source 1..114: note = Description of Artificial Sequence: Synthetic polypeptide; note = VL of XENP023638
DVLMTQSPDSLAVSLGERATINCKSSQSIVHSNGNTYLEWYQQKPGQSPKLLIYKVSNRFSGVPDRFSGSGSGTDFTLTISSLQAEDVAVYYCFQGSHVGNTFGGGTKVEIKGS

SEQ ID NO: 33616 - protein, 5 aa, synthetic construct
  source 1..5: note = Description of Artificial Sequence: Synthetic peptide; note = XENP023638 vhCDR1
HYGMN

SEQ ID NO: 33617 - protein, 17 aa, synthetic construct
  source 1..17: note = Description of Artificial Sequence: Synthetic peptide; note = XENP023638 vhCDR2
WINTYTGEPTYADGFTG

SEQ ID NO: 33618 - protein, 8 aa, synthetic construct
  source 1..8: note = Description of Artificial Sequence: Synthetic peptide; note = XENP023638 vhCDR3
DYYGSSPY

SEQ ID NO: 33619 - protein, 16 aa, synthetic construct
  source 1..16: note = Description of Artificial Sequence: Synthetic peptide; note = XENP023638 vlCDR1
KSSQSIVHSNGNTYLE

SEQ ID NO: 33620 - protein, 7 aa, synthetic construct
  source 1..7: note = Description of Artificial Sequence: Synthetic peptide; note = XENP023638 vlCDR2
KVSNRFS

SEQ ID NO: 33621 - protein, 9 aa, synthetic construct
  source 1..9: note = Description of Artificial Sequence: Synthetic peptide; note = XENP023638 vlCDR3
FQGSHVGNT

SEQ ID NO: 33622 - protein, 251 aa, synthetic construct
  source 1..251: note = Description of Artificial Sequence: Synthetic polypeptide; note = XENP023639 1C11_H3_L3.79_scFv
QIQLVQSGSELKKPGASVKVSCKASGYTFTHYGMNWVRQAPGQGLEWMGWINTYTGEPTYADGFTGRFVFSLDTSVSTAYLQISSLKAEDTAVYFCARDYYGSSPYWGQGTLVTVSSGKPGSGKPGSGKPGSGKPGSDVLMTQSPDSLAVSLGERATINCKSSQSIVHSNGNTYLEWYQQKPGQSPKLLIYKVSNRFSGVPDRFSGSGSGTDFTLTISSLQAEDVAVYYCFQGSHVHNTFGGGTKVEIKGS

SEQ ID NO: 33623 - protein, 117 aa, synthetic construct; identical to SEQ ID NO: 33034
  source 1..117: note = Description of Artificial Sequence: Synthetic polypeptide; note = VH of XENP023639

SEQ ID NO: 33624 - protein, 114 aa, synthetic construct
  source 1..114: note = Description of Artificial Sequence: Synthetic polypeptide; note = VL of XENP023639
DVLMTQSPDSLAVSLGERATINCKSSQSIVHSNGNTYLEWYQQKPGQSPKLLIYKVSNRFSGVPDRFSGSGSGTDFTLTISSLQAEDVAVYYCFQGSHVHNTFGGGTKVEIKGS

SEQ ID NO: 33625 - protein, 5 aa, synthetic construct
  source 1..5: note = Description of Artificial Sequence: Synthetic peptide; note = XENP023639 vhCDR1
HYGMN

SEQ ID NO: 33626 - protein, 17 aa, synthetic construct
  source 1..17: note = Description of Artificial Sequence: Synthetic peptide; note = XENP023639 vhCDR2
WINTYTGEPTYADGFTG

SEQ ID NO: 33627 - protein, 8 aa, synthetic construct
  source 1..8: note = Description of Artificial Sequence: Synthetic peptide; note = XENP023639 vhCDR3
DYYGSSPY

SEQ ID NO: 33628 - protein, 16 aa, synthetic construct
  source 1..16: note = Description of Artificial Sequence: Synthetic peptide; note = XENP023639 vlCDR1
KSSQSIVHSNGNTYLE

SEQ ID NO: 33629 - protein, 7 aa, synthetic construct
  source 1..7: note = Description of Artificial Sequence: Synthetic peptide; note = XENP023639 vlCDR2
KVSNRFS

SEQ ID NO: 33630 - protein, 9 aa, synthetic construct
  source 1..9: note = Description of Artificial Sequence: Synthetic peptide; note = XENP023639 vlCDR3
FQGSHVHNT

SEQ ID NO: 33631 - protein, 251 aa, synthetic construct
  source 1..251: note = Description of Artificial Sequence: Synthetic polypeptide; note = XENP023640 1C11_H3_L3.81_scFv
QIQLVQSGSELKKPGASVKVSCKASGYTFTHYGMNWVRQAPGQGLEWMGWINTYTGEPTYADGFTGRFVFSLDTSVSTAYLQISSLKAEDTAVYFCARDYYGSSPYWGQGTLVTVSSGKPGSGKPGSGKPGSGKPGSDVLMTQSPDSLAVSLGERATINCKSSQSIVHSNGNTYLEWYQQKPGQSPKLLIYKVSNRFSGVPDRFSGSGSGTDFTLTISSLQAEDVAVYYCFQGSHVPNTFGQGTKVEIKGS

SEQ ID NO: 33632 - protein, 117 aa, synthetic construct; identical to SEQ ID NO: 33034
  source 1..117: note = Description of Artificial Sequence: Synthetic polypeptide; note = VH of XENP023640

SEQ ID NO: 33633 - protein, 114 aa, synthetic construct
  source 1..114: note = Description of Artificial Sequence: Synthetic polypeptide; note = VL of XENP023640
DVLMTQSPDSLAVSLGERATINCKSSQSIVHSNGNTYLEWYQQKPGQSPKLLIYKVSNRFSGVPDRFSGSGSGTDFTLTISSLQAEDVAVYYCFQGSHVPNTFGQGTKVEIKGS

SEQ ID NO: 33634 - protein, 5 aa, synthetic construct
  source 1..5: note = Description of Artificial Sequence: Synthetic peptide; note = XENP023640 vhCDR1
HYGMN

SEQ ID NO: 33635 - protein, 17 aa, synthetic construct
  source 1..17: note = Description of Artificial Sequence: Synthetic peptide; note = XENP023640 vhCDR2
WINTYTGEPTYADGFTG

SEQ ID NO: 33636 - protein, 8 aa, synthetic construct
  source 1..8: note = Description of Artificial Sequence: Synthetic peptide; note = XENP023640 vhCDR3
DYYGSSPY

SEQ ID NO: 33637 - protein, 16 aa, synthetic construct
  source 1..16: note = Description of Artificial Sequence: Synthetic peptide; note = XENP023640 vlCDR1
KSSQSIVHSNGNTYLE

SEQ ID NO: 33638 - protein, 7 aa, synthetic construct
  source 1..7: note = Description of Artificial Sequence: Synthetic peptide; note = XENP023640 vlCDR2
KVSNRFS

SEQ ID NO: 33639 - protein, 9 aa, synthetic construct
  source 1..9: note = Description of Artificial Sequence: Synthetic peptide; note = XENP023640 vlCDR3
FQGSHVPNT

SEQ ID NO: 33640 - protein, 251 aa, synthetic construct
  source 1..251: note = Description of Artificial Sequence: Synthetic polypeptide; note = XENP023641 1C11_H3_L3.82_scFv
QIQLVQSGSELKKPGASVKVSCKASGYTFTHYGMNWVRQAPGQGLEWMGWINTYTGEPTYADGFTGRFVFSLDTSVSTAYLQISSLKAEDTAVYFCARDYYGSSPYWGQGTLVTVSSGKPGSGKPGSGKPGSGKPGSDVLMTQSPDSLAVSLGERATINCKSSQSIVHSNGNTYLEWYQQKPGQSPKLLIYKVSNRFSGVPDRFSGSGSGTDFTLTISSLQAEDVAVYYCFQGSHVPNTFGGGTKLEIKGS

SEQ ID NO: 33641 - protein, 117 aa, synthetic construct; identical to SEQ ID NO: 33034
  source 1..117: note = Description of Artificial Sequence: Synthetic polypeptide; note = VH of XENP023641

SEQ ID NO: 33642 - protein, 114 aa, synthetic construct
  source 1..114: note = Description of Artificial Sequence: Synthetic polypeptide; note = VL of XENP023641
DVLMTQSPDSLAVSLGERATINCKSSQSIVHSNGNTYLEWYQQKPGQSPKLLIYKVSNRFSGVPDRFSGSGSGTDFTLTISSLQAEDVAVYYCFQGSHVPNTFGGGTKLEIKGS

SEQ ID NO: 33643 - protein, 5 aa, synthetic construct
  source 1..5: note = Description of Artificial Sequence: Synthetic peptide; note = XENP023641 vhCDR1
HYGMN

SEQ ID NO: 33644 - protein, 17 aa, synthetic construct
  source 1..17: note = Description of Artificial Sequence: Synthetic peptide; note = XENP023641 vhCDR2
WINTYTGEPTYADGFTG

SEQ ID NO: 33645 - protein, 8 aa, synthetic construct
  source 1..8: note = Description of Artificial Sequence: Synthetic peptide; note = XENP023641 vhCDR3
DYYGSSPY

SEQ ID NO: 33646 - protein, 16 aa, synthetic construct
  source 1..16: note = Description of Artificial Sequence: Synthetic peptide; note = XENP023641 vlCDR1
KSSQSIVHSNGNTYLE

SEQ ID NO: 33647 - protein, 7 aa, synthetic construct
  source 1..7: note = Description of Artificial Sequence: Synthetic peptide; note = XENP023641 vlCDR2
KVSNRFS

SEQ ID NO: 33648 - protein, 9 aa, synthetic construct
  source 1..9: note = Description of Artificial Sequence: Synthetic peptide; note = XENP023641 vlCDR3
FQGSHVPNT

SEQ ID NO: 33649 - protein, 251 aa, synthetic construct
  source 1..251: note = Description of Artificial Sequence: Synthetic polypeptide; note = XENP023755 1C11_H3.1_L3_scFv
QVQLVQSGSELKKPGASVKVSCKASGYTFTHYGMNWVRQAPGQGLEWMGWINTYTGEPTYADGFTGRFVFSLDTSVSTAYLQISSLKAEDTAVYFCARDYYGSSPYWGQGTLVTVSSGKPGSGKPGSGKPGSGKPGSDVLMTQSPDSLAVSLGERATINCKSSQSIVHSNGNTYLEWYQQKPGQSPKLLIYKVSNRFSGVPDRFSGSGSGTDFTLTISSLQAEDVAVYYCFQGSHVPNTFGGGTKVEIKGS

SEQ ID NO: 33650 - protein, 117 aa, synthetic construct
  source 1..117: note = Description of Artificial Sequence: Synthetic polypeptide; note = VH of XENP023755
QVQLVQSGSELKKPGASVKVSCKASGYTFTHYGMNWVRQAPGQGLEWMGWINTYTGEPTYADGFTGRFVFSLDTSVSTAYLQISSLKAEDTAVYFCARDYYGSSPYWGQGTLVTVSS

SEQ ID NO: 33651 - protein, 114 aa, synthetic construct
  source 1..114: note = Description of Artificial Sequence: Synthetic polypeptide; note = VL of XENP023755
DVLMTQSPDSLAVSLGERATINCKSSQSIVHSNGNTYLEWYQQKPGQSPKLLIYKVSNRFSGVPDRFSGSGSGTDFTLTISSLQAEDVAVYYCFQGSHVPNTFGGGTKVEIKGS

SEQ ID NO: 33652 - protein, 5 aa, synthetic construct
  source 1..5: note = Description of Artificial Sequence: Synthetic peptide; note = XENP023755 vhCDR1
HYGMN

SEQ ID NO: 33653 - protein, 17 aa, synthetic construct
  source 1..17: note = Description of Artificial Sequence: Synthetic peptide; note = XENP023755 vhCDR2
WINTYTGEPTYADGFTG

SEQ ID NO: 33654 - protein, 8 aa, synthetic construct
  source 1..8: note = Description of Artificial Sequence: Synthetic peptide; note = XENP023755 vhCDR3
DYYGSSPY

SEQ ID NO: 33655 - protein, 16 aa, synthetic construct
  source 1..16: note = Description of Artificial Sequence: Synthetic peptide; note = XENP023755 vlCDR1
KSSQSIVHSNGNTYLE

SEQ ID NO: 33656 - protein, 7 aa, synthetic construct
  source 1..7: note = Description of Artificial Sequence: Synthetic peptide; note = XENP023755 vlCDR2
KVSNRFS

SEQ ID NO: 33657 - protein, 9 aa, synthetic construct
  source 1..9: note = Description of Artificial Sequence: Synthetic peptide; note = XENP023755 vlCDR3
FQGSHVPNT

SEQ ID NO: 33658 - protein, 251 aa, synthetic construct
  source 1..251: note = Description of Artificial Sequence: Synthetic polypeptide; note = XENP023756 1C11_H3.2_L3_scFv
QMQLVQSGSELKKPGASVKVSCKASGYTFTHYGMNWVRQAPGQGLEWMGWINTYTGEPTYADGFTGRFVFSLDTSVSTAYLQISSLKAEDTAVYFCARDYYGSSPYWGQGTLVTVSSGKPGSGKPGSGKPGSGKPGSDVLMTQSPDSLAVSLGERATINCKSSQSIVHSNGNTYLEWYQQKPGQSPKLLIYKVSNRFSGVPDRFSGSGSGTDFTLTISSLQAEDVAVYYCFQGSHVPNTFGGGTKVEIKGS

SEQ ID NO: 33659 - protein, 117 aa, synthetic construct
  source 1..117: note = Description of Artificial Sequence: Synthetic polypeptide; note = VH of XENP023756
QMQLVQSGSELKKPGASVKVSCKASGYTFTHYGMNWVRQAPGQGLEWMGWINTYTGEPTYADGFTGRFVFSLDTSVSTAYLQISSLKAEDTAVYFCARDYYGSSPYWGQGTLVTVSS

SEQ ID NO: 33660 - protein, 114 aa, synthetic construct; identical to SEQ ID NO: 33651
  source 1..114: note = Description of Artificial Sequence: Synthetic polypeptide; note = VL of XENP023756

SEQ ID NO: 33661 - protein, 5 aa, synthetic construct
  source 1..5: note = Description of Artificial Sequence: Synthetic peptide; note = XENP023756 vhCDR1
HYGMN

SEQ ID NO: 33662 - protein, 17 aa, synthetic construct
  source 1..17: note = Description of Artificial Sequence: Synthetic peptide; note = XENP023756 vhCDR2
WINTYTGEPTYADGFTG

SEQ ID NO: 33663 - protein, 8 aa, synthetic construct
  source 1..8: note = Description of Artificial Sequence: Synthetic peptide; note = XENP023756 vhCDR3
DYYGSSPY

SEQ ID NO: 33664 - protein, 16 aa, synthetic construct
  source 1..16: note = Description of Artificial Sequence: Synthetic peptide; note = XENP023756 vlCDR1
KSSQSIVHSNGNTYLE

SEQ ID NO: 33665 - protein, 7 aa, synthetic construct
  source 1..7: note = Description of Artificial Sequence: Synthetic peptide; note = XENP023756 vlCDR2
KVSNRFS

SEQ ID NO: 33666 - protein, 9 aa, synthetic construct
  source 1..9: note = Description of Artificial Sequence: Synthetic peptide; note = XENP023756 vlCDR3
FQGSHVPNT

SEQ ID NO: 33667 - protein, 251 aa, synthetic construct
  source 1..251: note = Description of Artificial Sequence: Synthetic polypeptide; note = XENP023757 1C11_H3.4_L3_scFv
QIQLQQSGSELKKPGASVKVSCKASGYTFTHYGMNWVRQAPGQGLEWMGWINTYTGEPTYADGFTGRFVFSLDTSVSTAYLQISSLKAEDTAVYFCARDYYGSSPYWGQGTLVTVSSGKPGSGKPGSGKPGSGKPGSDVLMTQSPDSLAVSLGERATINCKSSQSIVHSNGNTYLEWYQQKPGQSPKLLIYKVSNRFSGVPDRFSGSGSGTDFTLTISSLQAEDVAVYYCFQGSHVPNTFGGGTKVEIKGS

SEQ ID NO: 33668 - protein, 117 aa, synthetic construct
  source 1..117: note = Description of Artificial Sequence: Synthetic polypeptide; note = VH of XENP023757
QIQLQQSGSELKKPGASVKVSCKASGYTFTHYGMNWVRQAPGQGLEWMGWINTYTGEPTYADGFTGRFVFSLDTSVSTAYLQISSLKAEDTAVYFCARDYYGSSPYWGQGTLVTVSS

SEQ ID NO: 33669 - protein, 114 aa, synthetic construct; identical to SEQ ID NO: 33651
  source 1..114: note = Description of Artificial Sequence: Synthetic polypeptide; note = VL of XENP023757

SEQ ID NO: 33670 - protein, 5 aa, synthetic construct
  source 1..5: note = Description of Artificial Sequence: Synthetic peptide; note = XENP023757 vhCDR1
HYGMN

SEQ ID NO: 33671 - protein, 17 aa, synthetic construct
  source 1..17: note = Description of Artificial Sequence: Synthetic peptide; note = XENP023757 vhCDR2
WINTYTGEPTYADGFTG

SEQ ID NO: 33672 - protein, 8 aa, synthetic construct
  source 1..8: note = Description of Artificial Sequence: Synthetic peptide; note = XENP023757 vhCDR3
DYYGSSPY

SEQ ID NO: 33673 - protein, 16 aa, synthetic construct
  source 1..16: note = Description of Artificial Sequence: Synthetic peptide; note = XENP023757 vlCDR1
KSSQSIVHSNGNTYLE

SEQ ID NO: 33674 - protein, 7 aa, synthetic construct
  source 1..7: note = Description of Artificial Sequence: Synthetic peptide; note = XENP023757 vlCDR2
KVSNRFS

SEQ ID NO: 33675 - protein, 9 aa, synthetic construct
  source 1..9: note = Description of Artificial Sequence: Synthetic peptide; note = XENP023757 vlCDR3
FQGSHVPNT

SEQ ID NO: 33676 - protein, 251 aa, synthetic construct
  source 1..251: note = Description of Artificial Sequence: Synthetic polypeptide; note = XENP023758 1C11_H3.5_L3_scFv
QIQLVQSGAELKKPGASVKVSCKASGYTFTHYGMNWVRQAPGQGLEWMGWINTYTGEPTYADGFTGRFVFSLDTSVSTAYLQISSLKAEDTAVYFCARDYYGSSPYWGQGTLVTVSSGKPGSGKPGSGKPGSGKPGSDVLMTQSPDSLAVSLGERATINCKSSQSIVHSNGNTYLEWYQQKPGQSPKLLIYKVSNRFSGVPDRFSGSGSGTDFTLTISSLQAEDVAVYYCFQGSHVPNTFGGGTKVEIKGS

SEQ ID NO: 33677 - protein, 117 aa, synthetic construct
  source 1..117: note = Description of Artificial Sequence: Synthetic polypeptide; note = VH of XENP023758
QIQLVQSGAELKKPGASVKVSCKASGYTFTHYGMNWVRQAPGQGLEWMGWINTYTGEPTYADGFTGRFVFSLDTSVSTAYLQISSLKAEDTAVYFCARDYYGSSPYWGQGTLVTVSS

SEQ ID NO: 33678 - protein, 114 aa, synthetic construct; identical to SEQ ID NO: 33651
  source 1..114: note = Description of Artificial Sequence: Synthetic polypeptide; note = VL of XENP023758

SEQ ID NO: 33679 - protein, 5 aa, synthetic construct
  source 1..5: note = Description of Artificial Sequence: Synthetic peptide; note = XENP023758 vhCDR1
HYGMN

SEQ ID NO: 33680 - protein, 17 aa, synthetic construct
  source 1..17: note = Description of Artificial Sequence: Synthetic peptide; note = XENP023758 vhCDR2
WINTYTGEPTYADGFTG

SEQ ID NO: 33681 - protein, 8 aa, synthetic construct
  source 1..8: note = Description of Artificial Sequence: Synthetic peptide; note = XENP023758 vhCDR3
DYYGSSPY

SEQ ID NO: 33682 - protein, 16 aa, synthetic construct
  source 1..16: note = Description of Artificial Sequence: Synthetic peptide; note = XENP023758 vlCDR1
KSSQSIVHSNGNTYLE

SEQ ID NO: 33683 - protein, 7 aa, synthetic construct
  source 1..7: note = Description of Artificial Sequence: Synthetic peptide; note = XENP023758 vlCDR2
KVSNRFS

SEQ ID NO: 33684 - protein, 9 aa, synthetic construct
  source 1..9: note = Description of Artificial Sequence: Synthetic peptide; note = XENP023758 vlCDR3
FQGSHVPNT

SEQ ID NO: 33685 - protein, 251 aa, synthetic construct
  source 1..251: note = Description of Artificial Sequence: Synthetic polypeptide; note = XENP023759 1C11_H3.6_L3_scFv
QIQLVQSGGELKKPGASVKVSCKASGYTFTHYGMNWVRQAPGQGLEWMGWINTYTGEPTYADGFTGRFVFSLDTSVSTAYLQISSLKAEDTAVYFCARDYYGSSPYWGQGTLVTVSSGKPGSGKPGSGKPGSGKPGSDVLMTQSPDSLAVSLGERATINCKSSQSIVHSNGNTYLEWYQQKPGQSPKLLIYKVSNRFSGVPDRFSGSGSGTDFTLTISSLQAEDVAVYYCFQGSHVPNTFGGGTKVEIKGS

SEQ ID NO: 33686 - protein, 117 aa, synthetic construct
  source 1..117: note = Description of Artificial Sequence: Synthetic polypeptide; note = VH of XENP023759
QIQLVQSGGELKKPGASVKVSCKASGYTFTHYGMNWVRQAPGQGLEWMGWINTYTGEPTYADGFTGRFVFSLDTSVSTAYLQISSLKAEDTAVYFCARDYYGSSPYWGQGTLVTVSS

SEQ ID NO: 33687 - protein, 114 aa, synthetic construct; identical to SEQ ID NO: 33651
  source 1..114: note = Description of Artificial Sequence: Synthetic polypeptide; note = VL of XENP023759

SEQ ID NO: 33688 - protein, 5 aa, synthetic construct
  source 1..5: note = Description of Artificial Sequence: Synthetic peptide; note = XENP023759 vhCDR1
HYGMN

SEQ ID NO: 33689 - protein, 17 aa, synthetic construct
  source 1..17: note = Description of Artificial Sequence: Synthetic peptide; note = XENP023759 vhCDR2
WINTYTGEPTYADGFTG

SEQ ID NO: 33690 - protein, 8 aa, synthetic construct
  source 1..8: note = Description of Artificial Sequence: Synthetic peptide; note = XENP023759 vhCDR3
DYYGSSPY

SEQ ID NO: 33691 - protein, 16 aa, synthetic construct
  source 1..16: note = Description of Artificial Sequence: Synthetic peptide; note = XENP023759 vlCDR1
KSSQSIVHSNGNTYLE

SEQ ID NO: 33692 - protein, 7 aa, synthetic construct
  source 1..7: note = Description of Artificial Sequence: Synthetic peptide; note = XENP023759 vlCDR2
KVSNRFS

SEQ ID NO: 33693 - protein, 9 aa, synthetic construct
  source 1..9: note = Description of Artificial Sequence: Synthetic peptide; note = XENP023759 vlCDR3
FQGSHVPNT

SEQ ID NO: 33694 - protein, 251 aa, synthetic construct
  source 1..251: note = Description of Artificial Sequence: Synthetic polypeptide; note = XENP023760 1C11_H3.7_L3_scFv
QIQLVQSGPELKKPGASVKVSCKASGYTFTHYGMNWVRQAPGQGLEWMGWINTYTGEPTYADGFTGRFVFSLDTSVSTAYLQISSLKAEDTAVYFCARDYYGSSPYWGQGTLVTVSSGKPGSGKPGSGKPGSGKPGSDVLMTQSPDSLAVSLGERATINCKSSQSIVHSNGNTYLEWYQQKPGQSPKLLIYKVSNRFSGVPDRFSGSGSGTDFTLTISSLQAEDVAVYYCFQGSHVPNTFGGGTKVEIKGS

SEQ ID NO: 33695 - protein, 117 aa, synthetic construct
  source 1..117: note = Description of Artificial Sequence: Synthetic polypeptide; note = VH of XENP023760
QIQLVQSGPELKKPGASVKVSCKASGYTFTHYGMNWVRQAPGQGLEWMGWINTYTGEPTYADGFTGRFVFSLDTSVSTAYLQISSLKAEDTAVYFCARDYYGSSPYWGQGTLVTVSS

SEQ ID NO: 33696 - protein, 114 aa, synthetic construct; identical to SEQ ID NO: 33651
  source 1..114: note = Description of Artificial Sequence: Synthetic polypeptide; note = VL of XENP023760

SEQ ID NO: 33697 - protein, 5 aa, synthetic construct
  source 1..5: note = Description of Artificial Sequence: Synthetic peptide; note = XENP023760 vhCDR1
HYGMN

SEQ ID NO: 33698 - protein, 17 aa, synthetic construct
  source 1..17: note = Description of Artificial Sequence: Synthetic peptide; note = XENP023760 vhCDR2
WINTYTGEPTYADGFTG

SEQ ID NO: 33699 - protein, 8 aa, synthetic construct
  source 1..8: note = Description of Artificial Sequence: Synthetic peptide; note = XENP023760 vhCDR3
DYYGSSPY

SEQ ID NO: 33700 - protein, 16 aa, synthetic construct
  source 1..16: note = Description of Artificial Sequence: Synthetic peptide; note = XENP023760 vlCDR1
KSSQSIVHSNGNTYLE

SEQ ID NO: 33701 - protein, 7 aa, synthetic construct
  source 1..7: note = Description of Artificial Sequence: Synthetic peptide; note = XENP023760 vlCDR2
KVSNRFS

SEQ ID NO: 33702 - protein, 9 aa, synthetic construct
  source 1..9: note = Description of Artificial Sequence: Synthetic peptide; note = XENP023760 vlCDR3
FQGSHVPNT

SEQ ID NO: 33703 - protein, 251 aa, synthetic construct
  source 1..251: note = Description of Artificial Sequence: Synthetic polypeptide; note = XENP023761 1C11_H3.8_L3_scFv
QIQLVQSGHELKKPGASVKVSCKASGYTFTHYGMNWVRQAPGQGLEWMGWINTYTGEPTYADGFTGRFVFSLDTSVSTAYLQISSLKAEDTAVYFCARDYYGSSPYWGQGTLVTVSSGKPGSGKPGSGKPGSGKPGSDVLMTQSPDSLAVSLGERATINCKSSQSIVHSNGNTYLEWYQQKPGQSPKLLIYKVSNRFSGVPDRFSGSGSGTDFTLTISSLQAEDVAVYYCFQGSHVPNTFGGGTKVEIKGS

SEQ ID NO: 33704 - protein, 117 aa, synthetic construct
  source 1..117: note = Description of Artificial Sequence: Synthetic polypeptide; note = VH of XENP023761
QIQLVQSGHELKKPGASVKVSCKASGYTFTHYGMNWVRQAPGQGLEWMGWINTYTGEPTYADGFTGRFVFSLDTSVSTAYLQISSLKAEDTAVYFCARDYYGSSPYWGQGTLVTVSS

SEQ ID NO: 33705 - protein, 114 aa, synthetic construct; identical to SEQ ID NO: 33651
  source 1..114: note = Description of Artificial Sequence: Synthetic polypeptide; note = VL of XENP023761

SEQ ID NO: 33706 - protein, 5 aa, synthetic construct
  source 1..5: note = Description of Artificial Sequence: Synthetic peptide; note = XENP023761 vhCDR1
HYGMN

SEQ ID NO: 33707 - protein, 17 aa, synthetic construct
  source 1..17: note = Description of Artificial Sequence: Synthetic peptide; note = XENP023761 vhCDR2
WINTYTGEPTYADGFTG

SEQ ID NO: 33708 - protein, 8 aa, synthetic construct
  source 1..8: note = Description of Artificial Sequence: Synthetic peptide; note = XENP023761 vhCDR3
DYYGSSPY

SEQ ID NO: 33709 - protein, 16 aa, synthetic construct
  source 1..16: note = Description of Artificial Sequence: Synthetic peptide; note = XENP023761 vlCDR1
KSSQSIVHSNGNTYLE

SEQ ID NO: 33710 - protein, 7 aa, synthetic construct
  source 1..7: note = Description of Artificial Sequence: Synthetic peptide; note = XENP023761 vlCDR2
KVSNRFS

SEQ ID NO: 33711 - protein, 9 aa, synthetic construct
  source 1..9: note = Description of Artificial Sequence: Synthetic peptide; note = XENP023761 vlCDR3
FQGSHVPNT

SEQ ID NO: 33712 - protein, 251 aa, synthetic construct
  source 1..251: note = Description of Artificial Sequence: Synthetic polypeptide; note = XENP023762 1C11_H3.11_L3_scFv
QIQLVQSGSELKKPGASVKLSCKASGYTFTHYGMNWVRQAPGQGLEWMGWINTYTGEPTYADGFTGRFVFSLDTSVSTAYLQISSLKAEDTAVYFCARDYYGSSPYWGQGTLVTVSSGKPGSGKPGSGKPGSGKPGSDVLMTQSPDSLAVSLGERATINCKSSQSIVHSNGNTYLEWYQQKPGQSPKLLIYKVSNRFSGVPDRFSGSGSGTDFTLTISSLQAEDVAVYYCFQGSHVPNTFGGGTKVEIKGS

SEQ ID NO: 33713 - protein, 117 aa, synthetic construct
  source 1..117: note = Description of Artificial Sequence: Synthetic polypeptide; note = VH of XENP023762
QIQLVQSGSELKKPGASVKLSCKASGYTFTHYGMNWVRQAPGQGLEWMGWINTYTGEPTYADGFTGRFVFSLDTSVSTAYLQISSLKAEDTAVYFCARDYYGSSPYWGQGTLVTVSS

SEQ ID NO: 33714 - protein, 114 aa, synthetic construct; identical to SEQ ID NO: 33651
  source 1..114: note = Description of Artificial Sequence: Synthetic polypeptide; note = VL of XENP023762

SEQ ID NO: 33715 - protein, 5 aa, synthetic construct
  source 1..5: note = Description of Artificial Sequence: Synthetic peptide; note = XENP023762 vhCDR1
HYGMN

SEQ ID NO: 33716 - protein, 17 aa, synthetic construct
  source 1..17: note = Description of Artificial Sequence: Synthetic peptide; note = XENP023762 vhCDR2
WINTYTGEPTYADGFTG

SEQ ID NO: 33717 - protein, 8 aa, synthetic construct
  source 1..8: note = Description of Artificial Sequence: Synthetic peptide; note = XENP023762 vhCDR3
DYYGSSPY

SEQ ID NO: 33718 - protein, 16 aa, synthetic construct
  source 1..16: note = Description of Artificial Sequence: Synthetic peptide; note = XENP023762 vlCDR1
KSSQSIVHSNGNTYLE

SEQ ID NO: 33719 - protein, 7 aa, synthetic construct
  source 1..7: note = Description of Artificial Sequence: Synthetic peptide; note = XENP023762 vlCDR2
KVSNRFS

SEQ ID NO: 33720 - protein, 9 aa, synthetic construct
  source 1..9: note = Description of Artificial Sequence: Synthetic peptide; note = XENP023762 vlCDR3
FQGSHVPNT

SEQ ID NO: 33721 - protein, 251 aa, synthetic construct
  source 1..251: note = Description of Artificial Sequence: Synthetic polypeptide; note = XENP023763 1C11_H3.12_L3_scFv
QIQLVQSGSELKKPGASVKMSCKASGYTFTHYGMNWVRQAPGQGLEWMGWINTYTGEPTYADGFTGRFVFSLDTSVSTAYLQISSLKAEDTAVYFCARDYYGSSPYWGQGTLVTVSSGKPGSGKPGSGKPGSGKPGSDVLMTQSPDSLAVSLGERATINCKSSQSIVHSNGNTYLEWYQQKPGQSPKLLIYKVSNRFSGVPDRFSGSGSGTDFTLTISSLQAEDVAVYYCFQGSHVPNTFGGGTKVEIKGS

SEQ ID NO: 33722 - protein, 117 aa, synthetic construct
  source 1..117: note = Description of Artificial Sequence: Synthetic polypeptide; note = VH of XENP023763
QIQLVQSGSELKKPGASVKMSCKASGYTFTHYGMNWVRQAPGQGLEWMGWINTYTGEPTYADGFTGRFVFSLDTSVSTAYLQISSLKAEDTAVYFCARDYYGSSPYWGQGTLVTVSS

SEQ ID NO: 33723 - protein, 114 aa, synthetic construct; identical to SEQ ID NO: 33651
  source 1..114: note = Description of Artificial Sequence: Synthetic polypeptide; note = VL of XENP023763

SEQ ID NO: 33724 - protein, 5 aa, synthetic construct
  source 1..5: note = Description of Artificial Sequence: Synthetic peptide; note = XENP023763 vhCDR1
HYGMN

SEQ ID NO: 33725 - protein, 17 aa, synthetic construct
  source 1..17: note = Description of Artificial Sequence: Synthetic peptide; note = XENP023763 vhCDR2
WINTYTGEPTYADGFTG

SEQ ID NO: 33726 - protein, 8 aa, synthetic construct
  source 1..8: note = Description of Artificial Sequence: Synthetic peptide; note = XENP023763 vhCDR3
DYYGSSPY

SEQ ID NO: 33727 - protein, 16 aa, synthetic construct
  source 1..16: note = Description of Artificial Sequence: Synthetic peptide; note = XENP023763 vlCDR1
KSSQSIVHSNGNTYLE

SEQ ID NO: 33728 - protein, 7 aa, synthetic construct
  source 1..7: note = Description of Artificial Sequence: Synthetic peptide; note = XENP023763 vlCDR2
KVSNRFS

SEQ ID NO: 33729 - protein, 9 aa, synthetic construct
  source 1..9: note = Description of Artificial Sequence: Synthetic peptide; note = XENP023763 vlCDR3
FQGSHVPNT

SEQ ID NO: 33730 - protein, 251 aa, synthetic construct
  source 1..251: note = Description of Artificial Sequence: Synthetic polypeptide; note = XENP023764 1C11_H3.16_L3_scFv
QIQLVQSGSELKKPGASVKVSCKASGYTFTHYAMNWVRQAPGQGLEWMGWINTYTGEPTYADGFTGRFVFSLDTSVSTAYLQISSLKAEDTAVYFCARDYYGSSPYWGQGTLVTVSSGKPGSGKPGSGKPGSGKPGSDVLMTQSPDSLAVSLGERATINCKSSQSIVHSNGNTYLEWYQQKPGQSPKLLIYKVSNRFSGVPDRFSGSGSGTDFTLTISSLQAEDVAVYYCFQGSHVPNTFGGGTKVEIKGS

SEQ ID NO: 33731 - protein, 117 aa, synthetic construct
  source 1..117: note = Description of Artificial Sequence: Synthetic polypeptide; note = VH of XENP023764
QIQLVQSGSELKKPGASVKVSCKASGYTFTHYAMNWVRQAPGQGLEWMGWINTYTGEPTYADGFTGRFVFSLDTSVSTAYLQISSLKAEDTAVYFCARDYYGSSPYWGQGTLVTVSS

SEQ ID NO: 33732 - protein, 114 aa, synthetic construct; identical to SEQ ID NO: 33651
  source 1..114: note = Description of Artificial Sequence: Synthetic polypeptide; note = VL of XENP023764

SEQ ID NO: 33733 - protein, 5 aa, synthetic construct
  source 1..5: note = Description of Artificial Sequence: Synthetic peptide; note = XENP023764 vhCDR1
HYAMN

SEQ ID NO: 33734 - protein, 17 aa, synthetic construct
  source 1..17: note = Description of Artificial Sequence: Synthetic peptide; note = XENP023764 vhCDR2
WINTYTGEPTYADGFTG

SEQ ID NO: 33735 - protein, 8 aa, synthetic construct
  source 1..8: note = Description of Artificial Sequence: Synthetic peptide; note = XENP023764 vhCDR3
DYYGSSPY

SEQ ID NO: 33736 - protein, 16 aa, synthetic construct
  source 1..16: note = Description of Artificial Sequence: Synthetic peptide; note = XENP023764 vlCDR1
KSSQSIVHSNGNTYLE

SEQ ID NO: 33737 - protein, 7 aa, synthetic construct
  source 1..7: note = Description of Artificial Sequence: Synthetic peptide; note = XENP023764 vlCDR2
KVSNRFS

SEQ ID NO: 33738 - protein, 9 aa, synthetic construct
  source 1..9: note = Description of Artificial Sequence: Synthetic peptide; note = XENP023764 vlCDR3
FQGSHVPNT

SEQ ID NO: 33739 - protein, 251 aa, synthetic construct
  source 1..251: note = Description of Artificial Sequence: Synthetic polypeptide; note = XENP023765 1C11_H3.18_L3_scFv
QIQLVQSGSELKKPGASVKVSCKASGYTFTHYGMNWVKQAPGQGLEWMGWINTYTGEPTYADGFTGRFVFSLDTSVSTAYLQISSLKAEDTAVYFCARDYYGSSPYWGQGTLVTVSSGKPGSGKPGSGKPGSGKPGSDVLMTQSPDSLAVSLGERATINCKSSQSIVHSNGNTYLEWYQQKPGQSPKLLIYKVSNRFSGVPDRFSGSGSGTDFTLTISSLQAEDVAVYYCFQGSHVPNTFGGGTKVEIKGS

SEQ ID NO: 33740 - protein, 117 aa, synthetic construct
  source 1..117: note = Description of Artificial Sequence: Synthetic polypeptide; note = VH of XENP023765
QIQLVQSGSELKKPGASVKVSCKASGYTFTHYGMNWVKQAPGQGLEWMGWINTYTGEPTYADGFTGRFVFSLDTSVSTAYLQISSLKAEDTAVYFCARDYYGSSPYWGQGTLVTVSS

SEQ ID NO: 33741 - protein, 114 aa, synthetic construct; identical to SEQ ID NO: 33651
  source 1..114: note = Description of Artificial Sequence: Synthetic polypeptide; note = VL of XENP023765

SEQ ID NO: 33742 - protein, 5 aa, synthetic construct
  source 1..5: note = Description of Artificial Sequence: Synthetic peptide; note = XENP023765 vhCDR1
HYGMN

SEQ ID NO: 33743 - protein, 17 aa, synthetic construct
  source 1..17: note = Description of Artificial Sequence: Synthetic peptide; note = XENP023765 vhCDR2
WINTYTGEPTYADGFTG

SEQ ID NO: 33744 - protein, 8 aa, synthetic construct
  source 1..8: note = Description of Artificial Sequence: Synthetic peptide; note = XENP023765 vhCDR3
DYYGSSPY

SEQ ID NO: 33745 - protein, 16 aa, synthetic construct
  source 1..16: note = Description of Artificial Sequence: Synthetic peptide; note = XENP023765 vlCDR1
KSSQSIVHSNGNTYLE

SEQ ID NO: 33746 - protein, 7 aa, synthetic construct
  source 1..7: note = Description of Artificial Sequence: Synthetic peptide; note = XENP023765 vlCDR2
KVSNRFS

SEQ ID NO: 33747 - protein, 9 aa, synthetic construct
  source 1..9: note = Description of Artificial Sequence: Synthetic peptide; note = XENP023765 vlCDR3
FQGSHVPNT

SEQ ID NO: 33748 - protein, 251 aa, synthetic construct
  source 1..251: note = Description of Artificial Sequence: Synthetic polypeptide; note = XENP023766 1C11_H3.19_L3_scFv
QIQLVQSGSELKKPGASVKVSCKASGYTFTHYGMNWVRQAPGKGLEWMGWINTYTGEPTYADGFTGRFVFSLDTSVSTAYLQISSLKAEDTAVYFCARDYYGSSPYWGQGTLVTVSSGKPGSGKPGSGKPGSGKPGSDVLMTQSPDSLAVSLGERATINCKSSQSIVHSNGNTYLEWYQQKPGQSPKLLIYKVSNRFSGVPDRFSGSGSGTDFTLTISSLQAEDVAVYYCFQGSHVPNTFGGGTKVEIKGS

SEQ ID NO: 33749 - protein, 117 aa, synthetic construct
  source 1..117: note = Description of Artificial Sequence: Synthetic polypeptide; note = VH of XENP023766
QIQLVQSGSELKKPGASVKVSCKASGYTFTHYGMNWVRQAPGKGLEWMGWINTYTGEPTYADGFTGRFVFSLDTSVSTAYLQISSLKAEDTAVYFCARDYYGSSPYWGQGTLVTVSS

SEQ ID NO: 33750 - protein, 114 aa, synthetic construct; identical to SEQ ID NO: 33651
  source 1..114: note = Description of Artificial Sequence: Synthetic polypeptide; note = VL of XENP023766

SEQ ID NO: 33751 - protein, 5 aa, synthetic construct
  source 1..5: note = Description of Artificial Sequence: Synthetic peptide; note = XENP023766 vhCDR1
HYGMN

SEQ ID NO: 33752 - protein, 17 aa, synthetic construct
  source 1..17: note = Description of Artificial Sequence: Synthetic peptide; note = XENP023766 vhCDR2
WINTYTGEPTYADGFTG

SEQ ID NO: 33753 - protein, 8 aa, synthetic construct
  source 1..8: note = Description of Artificial Sequence: Synthetic peptide; note = XENP023766 vhCDR3
DYYGSSPY

SEQ ID NO: 33754 - protein, 16 aa, synthetic construct
  source 1..16: note = Description of Artificial Sequence: Synthetic peptide; note = XENP023766 vlCDR1
KSSQSIVHSNGNTYLE

SEQ ID NO: 33755 - protein, 7 aa, synthetic construct
  source 1..7: note = Description of Artificial Sequence: Synthetic peptide; note = XENP023766 vlCDR2
KVSNRFS

SEQ ID NO: 33756 - protein, 9 aa, synthetic construct
  source 1..9: note = Description of Artificial Sequence: Synthetic peptide; note = XENP023766 vlCDR3
FQGSHVPNT

SEQ ID NO: 33757 - protein, 251 aa, synthetic construct
  source 1..251: note = Description of Artificial Sequence: Synthetic polypeptide; note = XENP023767 1C11_H3.20_L3_scFv
QIQLVQSGSELKKPGASVKVSCKASGYTFTHYGMNWVRQAPGRGLEWMGWINTYTGEPTYADGFTGRFVFSLDTSVSTAYLQISSLKAEDTAVYFCARDYYGSSPYWGQGTLVTVSSGKPGSGKPGSGKPGSGKPGSDVLMTQSPDSLAVSLGERATINCKSSQSIVHSNGNTYLEWYQQKPGQSPKLLIYKVSNRFSGVPDRFSGSGSGTDFTLTISSLQAEDVAVYYCFQGSHVPNTFGGGTKVEIKGS

SEQ ID NO: 33758 - protein, 117 aa, synthetic construct
  source 1..117: note = Description of Artificial Sequence: Synthetic polypeptide; note = VH of XENP023767
QIQLVQSGSELKKPGASVKVSCKASGYTFTHYGMNWVRQAPGRGLEWMGWINTYTGEPTYADGFTGRFVFSLDTSVSTAYLQISSLKAEDTAVYFCARDYYGSSPYWGQGTLVTVSS

SEQ ID NO: 33759 - protein, 114 aa, synthetic construct; identical to SEQ ID NO: 33651
  source 1..114: note = Description of Artificial Sequence: Synthetic polypeptide; note = VL of XENP023767

SEQ ID NO: 33760 - protein, 5 aa, synthetic construct
  source 1..5: note = Description of Artificial Sequence: Synthetic peptide; note = XENP023767 vhCDR1
HYGMN

SEQ ID NO: 33761 - protein, 17 aa, synthetic construct
  source 1..17: note = Description of Artificial Sequence: Synthetic peptide; note = XENP023767 vhCDR2
WINTYTGEPTYADGFTG

SEQ ID NO: 33762 - protein, 8 aa, synthetic construct
  source 1..8: note = Description of Artificial Sequence: Synthetic peptide; note = XENP023767 vhCDR3
DYYGSSPY

SEQ ID NO: 33763 - protein, 16 aa, synthetic construct
  source 1..16: note = Description of Artificial Sequence: Synthetic peptide; note = XENP023767 vlCDR1
KSSQSIVHSNGNTYLE

SEQ ID NO: 33764 - protein, 7 aa, synthetic construct
  source 1..7: note = Description of Artificial Sequence: Synthetic peptide; note = XENP023767 vlCDR2
KVSNRFS

SEQ ID NO: 33765 - protein, 9 aa, synthetic construct
  source 1..9: note = Description of Artificial Sequence: Synthetic peptide; note = XENP023767 vlCDR3
FQGSHVPNT

SEQ ID NO: 33766 - protein, 251 aa, synthetic construct
  source 1..251: note = Description of Artificial Sequence: Synthetic polypeptide; note = XENP023768 1C11_H3.21_L3_scFv
QIQLVQSGSELKKPGASVKVSCKASGYTFTHYGMNWVRQAPGHGLEWMGWINTYTGEPTYADGFTGRFVFSLDTSVSTAYLQISSLKAEDTAVYFCARDYYGSSPYWGQGTLVTVSSGKPGSGKPGSGKPGSGKPGSDVLMTQSPDSLAVSLGERATINCKSSQSIVHSNGNTYLEWYQQKPGQSPKLLIYKVSNRFSGVPDRFSGSGSGTDFTLTISSLQAEDVAVYYCFQGSHVPNTFGGGTKVEIKGS

SEQ ID NO: 33767 - protein, 117 aa, synthetic construct
  source 1..117: note = Description of Artificial Sequence: Synthetic polypeptide; note = VH of XENP023768
QIQLVQSGSELKKPGASVKVSCKASGYTFTHYGMNWVRQAPGHGLEWMGWINTYTGEPTYADGFTGRFVFSLDTSVSTAYLQISSLKAEDTAVYFCARDYYGSSPYWGQGTLVTVSS

SEQ ID NO: 33768 - protein, 114 aa, synthetic construct; identical to SEQ ID NO: 33651
  source 1..114: note = Description of Artificial Sequence: Synthetic polypeptide; note = VL of XENP023768

SEQ ID NO: 33769 - protein, 5 aa, synthetic construct
  source 1..5: note = Description of Artificial Sequence: Synthetic peptide; note = XENP023768 vhCDR1
HYGMN

SEQ ID NO: 33770 - protein, 17 aa, synthetic construct
  source 1..17: note = Description of Artificial Sequence: Synthetic peptide; note = XENP023768 vhCDR2
WINTYTGEPTYADGFTG

SEQ ID NO: 33771 - protein, 8 aa, synthetic construct
  source 1..8: note = Description of Artificial Sequence: Synthetic peptide; note = XENP023768 vhCDR3
DYYGSSPY

SEQ ID NO: 33772 - protein, 16 aa, synthetic construct
  source 1..16: note = Description of Artificial Sequence: Synthetic peptide; note = XENP023768 vlCDR1
KSSQSIVHSNGNTYLE

SEQ ID NO: 33773 - protein, 7 aa, synthetic construct
  source 1..7: note = Description of Artificial Sequence: Synthetic peptide; note = XENP023768 vlCDR2
KVSNRFS

SEQ ID NO: 33774 - protein, 9 aa, synthetic construct
  source 1..9: note = Description of Artificial Sequence: Synthetic peptide; note = XENP023768 vlCDR3
FQGSHVPNT

SEQ ID NO: 33775 - protein, 251 aa, synthetic construct
  source 1..251: note = Description of Artificial Sequence: Synthetic polypeptide; note = XENP023769 1C11_H3.22_L3_scFv
QIQLVQSGSELKKPGASVKVSCKASGYTFTHYGMNWVRQAPGEGLEWMGWINTYTGEPTYADGFTGRFVFSLDTSVSTAYLQISSLKAEDTAVYFCARDYYGSSPYWGQGTLVTVSSGKPGSGKPGSGKPGSGKPGSDVLMTQSPDSLAVSLGERATINCKSSQSIVHSNGNTYLEWYQQKPGQSPKLLIYKVSNRFSGVPDRFSGSGSGTDFTLTISSLQAEDVAVYYCFQGSHVPNTFGGGTKVEIKGS

SEQ ID NO: 33776 - protein, 117 aa, synthetic construct
  source 1..117: note = Description of Artificial Sequence: Synthetic polypeptide; note = VH of XENP023769
QIQLVQSGSELKKPGASVKVSCKASGYTFTHYGMNWVRQAPGEGLEWMGWINTYTGEPTYADGFTGRFVFSLDTSVSTAYLQISSLKAEDTAVYFCARDYYGSSPYWGQGTLVTVSS

SEQ ID NO: 33777 - protein, 114 aa, synthetic construct; identical to SEQ ID NO: 33651
  source 1..114: note = Description of Artificial Sequence: Synthetic polypeptide; note = VL of XENP023769

SEQ ID NO: 33778 - protein, 5 aa, synthetic construct
  source 1..5: note = Description of Artificial Sequence: Synthetic peptide; note = XENP023769 vhCDR1
HYGMN

SEQ ID NO: 33779 - protein, 17 aa, synthetic construct
  source 1..17: note = Description of Artificial Sequence: Synthetic peptide; note = XENP023769 vhCDR2
WINTYTGEPTYADGFTG

SEQ ID NO: 33780 - protein, 8 aa, synthetic construct
  source 1..8: note = Description of Artificial Sequence: Synthetic peptide; note = XENP023769 vhCDR3
DYYGSSPY

SEQ ID NO: 33781 - protein, 16 aa, synthetic construct
  source 1..16: note = Description of Artificial Sequence: Synthetic peptide; note = XENP023769 vlCDR1
KSSQSIVHSNGNTYLE

SEQ ID NO: 33782 - protein, 7 aa, synthetic construct
  source 1..7: note = Description of Artificial Sequence: Synthetic peptide; note = XENP023769 vlCDR2
KVSNRFS

SEQ ID NO: 33783 - protein, 9 aa, synthetic construct
  source 1..9: note = Description of Artificial Sequence: Synthetic peptide; note = XENP023769 vlCDR3
FQGSHVPNT

SEQ ID NO: 33784 - protein, 251 aa, synthetic construct
  source 1..251: note = Description of Artificial Sequence: Synthetic polypeptide; note = XENP023770 1C11_H3.25_L3_scFv
QIQLVQSGSELKKPGASVKVSCKASGYTFTHYGMNWVRQAPGQGLEWMGWINTNTGEPTYADGFTGRFVFSLDTSVSTAYLQISSLKAEDTAVYFCARDYYGSSPYWGQGTLVTVSSGKPGSGKPGSGKPGSGKPGSDVLMTQSPDSLAVSLGERATINCKSSQSIVHSNGNTYLEWYQQKPGQSPKLLIYKVSNRFSGVPDRFSGSGSGTDFTLTISSLQAEDVAVYYCFQGSHVPNTFGGGTKVEIKGS

SEQ ID NO: 33785 - protein, 117 aa, synthetic construct
  source 1..117: note = Description of Artificial Sequence: Synthetic polypeptide; note = VH of XENP023770
QIQLVQSGSELKKPGASVKVSCKASGYTFTHYGMNWVRQAPGQGLEWMGWINTNTGEPTYADGFTGRFVFSLDTSVSTAYLQISSLKAEDTAVYFCARDYYGSSPYWGQGTLVTVSS

SEQ ID NO: 33786 - protein, 114 aa, synthetic construct; identical to SEQ ID NO: 33651
  source 1..114: note = Description of Artificial Sequence: Synthetic polypeptide; note = VL of XENP023770

SEQ ID NO: 33787 - protein, 5 aa, synthetic construct
  source 1..5: note = Description of Artificial Sequence: Synthetic peptide; note = XENP023770 vhCDR1
HYGMN

SEQ ID NO: 33788 - protein, 17 aa, synthetic construct
  source 1..17: note = Description of Artificial Sequence: Synthetic peptide; note = XENP023770 vhCDR2
WINTNTGEPTYADGFTG

SEQ ID NO: 33789 - protein, 8 aa, synthetic construct
  source 1..8: note = Description of Artificial Sequence: Synthetic peptide; note = XENP023770 vhCDR3
DYYGSSPY

SEQ ID NO: 33790 - protein, 16 aa, synthetic construct
  source 1..16: note = Description of Artificial Sequence: Synthetic peptide; note = XENP023770 vlCDR1
KSSQSIVHSNGNTYLE

SEQ ID NO: 33791 - protein, 7 aa, synthetic construct
  source 1..7: note = Description of Artificial Sequence: Synthetic peptide; note = XENP023770 vlCDR2
KVSNRFS

SEQ ID NO: 33792 - protein, 9 aa, synthetic construct
  source 1..9: note = Description of Artificial Sequence: Synthetic peptide; note = XENP023770 vlCDR3
FQGSHVPNT

SEQ ID NO: 33793 - protein, 251 aa, synthetic construct
  source 1..251: note = Description of Artificial Sequence: Synthetic polypeptide; note = XENP023771 1C11_H3.26_L3_scFv
QIQLVQSGSELKKPGASVKVSCKASGYTFTHYGMNWVRQAPGQGLEWMGWINTYTGHPTYADGFTGRFVFSLDTSVSTAYLQISSLKAEDTAVYFCARDYYGSSPYWGQGTLVTVSSGKPGSGKPGSGKPGSGKPGSDVLMTQSPDSLAVSLGERATINCKSSQSIVHSNGNTYLEWYQQKPGQSPKLLIYKVSNRFSGVPDRFSGSGSGTDFTLTISSLQAEDVAVYYCFQGSHVPNTFGGGTKVEIKGS

SEQ ID NO: 33794 - protein, 117 aa, synthetic construct
  source 1..117: note = Description of Artificial Sequence: Synthetic polypeptide; note = VH of XENP023771
QIQLVQSGSELKKPGASVKVSCKASGYTFTHYGMNWVRQAPGQGLEWMGWINTYTGHPTYADGFTGRFVFSLDTSVSTAYLQISSLKAEDTAVYFCARDYYGSSPYWGQGTLVTVSS

SEQ ID NO: 33795 - protein, 114 aa, synthetic construct; identical to SEQ ID NO: 33651
  source 1..114: note = Description of Artificial Sequence: Synthetic polypeptide; note = VL of XENP023771

SEQ ID NO: 33796 - protein, 5 aa, synthetic construct
  source 1..5: note = Description of Artificial Sequence: Synthetic peptide; note = XENP023771 vhCDR1
HYGMN

SEQ ID NO: 33797 - protein, 17 aa, synthetic construct
  source 1..17: note = Description of Artificial Sequence: Synthetic peptide; note = XENP023771 vhCDR2
WINTYTGHPTYADGFTG

SEQ ID NO: 33798 - protein, 8 aa, synthetic construct
  source 1..8: note = Description of Artificial Sequence: Synthetic peptide; note = XENP023771 vhCDR3
DYYGSSPY

SEQ ID NO: 33799 - protein, 16 aa, synthetic construct
  source 1..16: note = Description of Artificial Sequence: Synthetic peptide; note = XENP023771 vlCDR1
KSSQSIVHSNGNTYLE

SEQ ID NO: 33800 - protein, 7 aa, synthetic construct
  source 1..7: note = Description of Artificial Sequence: Synthetic peptide; note = XENP023771 vlCDR2
KVSNRFS

SEQ ID NO: 33801 - protein, 9 aa, synthetic construct
  source 1..9: note = Description of Artificial Sequence: Synthetic peptide; note = XENP023771 vlCDR3
FQGSHVPNT

SEQ ID NO: 33802 - protein, 251 aa, synthetic construct
  source 1..251: note = Description of Artificial Sequence: Synthetic polypeptide; note = XENP023772 1C11_H3.30_L3_scFv
QIQLVQSGSELKKPGASVKVSCKASGYTFTHYGMNWVRQAPGQGLEWMGWINTYTGEPEYADGFTGRFVFSLDTSVSTAYLQISSLKAEDTAVYFCARDYYGSSPYWGQGTLVTVSSGKPGSGKPGSGKPGSGKPGSDVLMTQSPDSLAVSLGERATINCKSSQSIVHSNGNTYLEWYQQKPGQSPKLLIYKVSNRFSGVPDRFSGSGSGTDFTLTISSLQAEDVAVYYCFQGSHVPNTFGGGTKVEIKGS

SEQ ID NO: 33803 - protein, 117 aa, synthetic construct
  source 1..117: note = Description of Artificial Sequence: Synthetic polypeptide; note = VH of XENP023772
QIQLVQSGSELKKPGASVKVSCKASGYTFTHYGMNWVRQAPGQGLEWMGWINTYTGEPEYADGFTGRFVFSLDTSVSTAYLQISSLKAEDTAVYFCARDYYGSSPYWGQGTLVTVSS

SEQ ID NO: 33804 - protein, 114 aa, synthetic construct; identical to SEQ ID NO: 33651
  source 1..114: note = Description of Artificial Sequence: Synthetic polypeptide; note = VL of XENP023772

SEQ ID NO: 33805 - protein, 5 aa, synthetic construct
  source 1..5: note = Description of Artificial Sequence: Synthetic peptide; note = XENP023772 vhCDR1
HYGMN

SEQ ID NO: 33806 - protein, 17 aa, synthetic construct
  source 1..17: note = Description of Artificial Sequence: Synthetic peptide; note = XENP023772 vhCDR2
WINTYTGEPEYADGFTG

SEQ ID NO: 33807 - protein, 8 aa, synthetic construct
  source 1..8: note = Description of Artificial Sequence: Synthetic peptide; note = XENP023772 vhCDR3
DYYGSSPY

SEQ ID NO: 33808 - protein, 16 aa, synthetic construct
  source 1..16: note = Description of Artificial Sequence: Synthetic peptide; note = XENP023772 vlCDR1
KSSQSIVHSNGNTYLE

SEQ ID NO: 33809 - protein, 7 aa, synthetic construct
  source 1..7: note = Description of Artificial Sequence: Synthetic peptide; note = XENP023772 vlCDR2
KVSNRFS

SEQ ID NO: 33810 - protein, 9 aa, synthetic construct
  source 1..9: note = Description of Artificial Sequence: Synthetic peptide; note = XENP023772 vlCDR3
FQGSHVPNT

SEQ ID NO: 33811 - protein, 251 aa, synthetic construct
  source 1..251: note = Description of Artificial Sequence: Synthetic polypeptide; note = XENP023773 1C11_H3.32_L3_scFv
QIQLVQSGSELKKPGASVKVSCKASGYTFTHYGMNWVRQAPGQGLEWMGWINTYTGEPTYNDGFTGRFVFSLDTSVSTAYLQISSLKAEDTAVYFCARDYYGSSPYWGQGTLVTVSSGKPGSGKPGSGKPGSGKPGSDVLMTQSPDSLAVSLGERATINCKSSQSIVHSNGNTYLEWYQQKPGQSPKLLIYKVSNRFSGVPDRFSGSGSGTDFTLTISSLQAEDVAVYYCFQGSHVPNTFGGGTKVEIKGS

SEQ ID NO: 33812 - protein, 117 aa, synthetic construct
  source 1..117: note = Description of Artificial Sequence: Synthetic polypeptide; note = VH of XENP023773
QIQLVQSGSELKKPGASVKVSCKASGYTFTHYGMNWVRQAPGQGLEWMGWINTYTGEPTYNDGFTGRFVFSLDTSVSTAYLQISSLKAEDTAVYFCARDYYGSSPYWGQGTLVTVSS

SEQ ID NO: 33813 - protein, 114 aa, synthetic construct; identical to SEQ ID NO: 33651
  source 1..114: note = Description of Artificial Sequence: Synthetic polypeptide; note = VL of XENP023773

SEQ ID NO: 33814 - protein, 5 aa, synthetic construct
  source 1..5: note = Description of Artificial Sequence: Synthetic peptide; note = XENP023773 vhCDR1
HYGMN

SEQ ID NO: 33815 - protein, 17 aa, synthetic construct
  source 1..17: note = Description of Artificial Sequence: Synthetic peptide; note = XENP023773 vhCDR2
WINTYTGEPTYNDGFTG

SEQ ID NO: 33816 - protein, 8 aa, synthetic construct
  source 1..8: note = Description of Artificial Sequence: Synthetic peptide; note = XENP023773 vhCDR3
DYYGSSPY

SEQ ID NO: 33817 - protein, 16 aa, synthetic construct
  source 1..16: note = Description of Artificial Sequence: Synthetic peptide; note = XENP023773 vlCDR1
KSSQSIVHSNGNTYLE

SEQ ID NO: 33818 - protein, 7 aa, synthetic construct
  source 1..7: note = Description of Artificial Sequence: Synthetic peptide; note = XENP023773 vlCDR2
KVSNRFS

SEQ ID NO: 33819 - protein, 9 aa, synthetic construct
  source 1..9: note = Description of Artificial Sequence: Synthetic peptide; note = XENP023773 vlCDR3
FQGSHVPNT

SEQ ID NO: 33820 - protein, 251 aa, synthetic construct
  source 1..251: note = Description of Artificial Sequence: Synthetic polypeptide; note = XENP023774 1C11_H3.33_L3_scFv
QIQLVQSGSELKKPGASVKVSCKASGYTFTHYGMNWVRQAPGQGLEWMGWINTYTGEPTYAQGFTGRFVFSLDTSVSTAYLQISSLKAEDTAVYFCARDYYGSSPYWGQGTLVTVSSGKPGSGKPGSGKPGSGKPGSDVLMTQSPDSLAVSLGERATINCKSSQSIVHSNGNTYLEWYQQKPGQSPKLLIYKVSNRFSGVPDRFSGSGSGTDFTLTISSLQAEDVAVYYCFQGSHVPNTFGGGTKVEIKGS

SEQ ID NO: 33821 - protein, 117 aa, synthetic construct
  source 1..117: note = Description of Artificial Sequence: Synthetic polypeptide; note = VH of XENP023774
QIQLVQSGSELKKPGASVKVSCKASGYTFTHYGMNWVRQAPGQGLEWMGWINTYTGEPTYAQGFTGRFVFSLDTSVSTAYLQISSLKAEDTAVYFCARDYYGSSPYWGQGTLVTVSS

SEQ ID NO: 33822 - protein, 114 aa, synthetic construct; identical to SEQ ID NO: 33651
  source 1..114: note = Description of Artificial Sequence: Synthetic polypeptide; note = VL of XENP023774

SEQ ID NO: 33823 - protein, 5 aa, synthetic construct
  source 1..5: note = Description of Artificial Sequence: Synthetic peptide; note = XENP023774 vhCDR1
HYGMN

SEQ ID NO: 33824 - protein, 17 aa, synthetic construct
  source 1..17: note = Description of Artificial Sequence: Synthetic peptide; note = XENP023774 vhCDR2
WINTYTGEPTYAQGFTG

SEQ ID NO: 33825 - protein, 8 aa, synthetic construct
  source 1..8: note = Description of Artificial Sequence: Synthetic peptide; note = XENP023774 vhCDR3
DYYGSSPY

SEQ ID NO: 33826 - protein, 16 aa, synthetic construct
  source 1..16: note = Description of Artificial Sequence: Synthetic peptide; note = XENP023774 vlCDR1
KSSQSIVHSNGNTYLE

SEQ ID NO: 33827 - protein, 7 aa, synthetic construct
  source 1..7: note = Description of Artificial Sequence: Synthetic peptide; note = XENP023774 vlCDR2
KVSNRFS

SEQ ID NO: 33828 - protein, 9 aa, synthetic construct
  source 1..9: note = Description of Artificial Sequence: Synthetic peptide; note = XENP023774 vlCDR3
FQGSHVPNT

SEQ ID NO: 33829 - protein, 251 aa, synthetic construct
  source 1..251: note = Description of Artificial Sequence: Synthetic polypeptide; note = XENP023775 1C11_H3.34_L3_scFv
QIQLVQSGSELKKPGASVKVSCKASGYTFTHYGMNWVRQAPGQGLEWMGWINTYTGEPTYAEGFTGRFVFSLDTSVSTAYLQISSLKAEDTAVYFCARDYYGSSPYWGQGTLVTVSSGKPGSGKPGSGKPGSGKPGSDVLMTQSPDSLAVSLGERATINCKSSQSIVHSNGNTYLEWYQQKPGQSPKLLIYKVSNRFSGVPDRFSGSGSGTDFTLTISSLQAEDVAVYYCFQGSHVPNTFGGGTKVEIKGS

SEQ ID NO: 33830 - protein, 117 aa, synthetic construct
  source 1..117: note = Description of Artificial Sequence: Synthetic polypeptide; note = VH of XENP023775
QIQLVQSGSELKKPGASVKVSCKASGYTFTHYGMNWVRQAPGQGLEWMGWINTYTGEPTYAEGFTGRFVFSLDTSVSTAYLQISSLKAEDTAVYFCARDYYGSSPYWGQGTLVTVSS

SEQ ID NO: 33831 - protein, 114 aa, synthetic construct; identical to SEQ ID NO: 33651
  source 1..114: note = Description of Artificial Sequence: Synthetic polypeptide; note = VL of XENP023775

SEQ ID NO: 33832 - protein, 5 aa, synthetic construct
  source 1..5: note = Description of Artificial Sequence: Synthetic peptide; note = XENP023775 vhCDR1
HYGMN

SEQ ID NO: 33833 - protein, 17 aa, synthetic construct
  source 1..17: note = Description of Artificial Sequence: Synthetic peptide; note = XENP023775 vhCDR2
WINTYTGEPTYAEGFTG

SEQ ID NO: 33834 - protein, 8 aa, synthetic construct
  source 1..8: note = Description of Artificial Sequence: Synthetic peptide; note = XENP023775 vhCDR3
DYYGSSPY

SEQ ID NO: 33835 - protein, 16 aa, synthetic construct
  source 1..16: note = Description of Artificial Sequence: Synthetic peptide; note = XENP023775 vlCDR1
KSSQSIVHSNGNTYLE

SEQ ID NO: 33836 - protein, 7 aa, synthetic construct
  source 1..7: note = Description of Artificial Sequence: Synthetic peptide; note = XENP023775 vlCDR2
KVSNRFS

SEQ ID NO: 33837 - protein, 9 aa, synthetic construct
  source 1..9: note = Description of Artificial Sequence: Synthetic peptide; note = XENP023775 vlCDR3
FQGSHVPNT

SEQ ID NO: 33838 - protein, 251 aa, synthetic construct
  source 1..251: note = Description of Artificial Sequence: Synthetic polypeptide; note = XENP023776 1C11_H3.35_L3_scFv
QIQLVQSGSELKKPGASVKVSCKASGYTFTHYGMNWVRQAPGQGLEWMGWINTYTGEPTYADKFTGRFVFSLDTSVSTAYLQISSLKAEDTAVYFCARDYYGSSPYWGQGTLVTVSSGKPGSGKPGSGKPGSGKPGSDVLMTQSPDSLAVSLGERATINCKSSQSIVHSNGNTYLEWYQQKPGQSPKLLIYKVSNRFSGVPDRFSGSGSGTDFTLTISSLQAEDVAVYYCFQGSHVPNTFGGGTKVEIKGS

SEQ ID NO: 33839 - protein, 117 aa, synthetic construct
  source 1..117: note = Description of Artificial Sequence: Synthetic polypeptide; note = VH of XENP023776
QIQLVQSGSELKKPGASVKVSCKASGYTFTHYGMNWVRQAPGQGLEWMGWINTYTGEPTYADKFTGRFVFSLDTSVSTAYLQISSLKAEDTAVYFCARDYYGSSPYWGQGTLVTVSS

SEQ ID NO: 33840 - protein, 114 aa, synthetic construct; identical to SEQ ID NO: 33651
  source 1..114: note = Description of Artificial Sequence: Synthetic polypeptide; note = VL of XENP023776

SEQ ID NO: 33841 - protein, 5 aa, synthetic construct
  source 1..5: note = Description of Artificial Sequence: Synthetic peptide; note = XENP023776 vhCDR1
HYGMN

SEQ ID NO: 33842 - protein, 17 aa, synthetic construct
  source 1..17: note = Description of Artificial Sequence: Synthetic peptide; note = XENP023776 vhCDR2
WINTYTGEPTYADKFTG

SEQ ID NO: 33843 - protein, 8 aa, synthetic construct
  source 1..8: note = Description of Artificial Sequence: Synthetic peptide; note = XENP023776 vhCDR3
DYYGSSPY

SEQ ID NO: 33844 - protein, 16 aa, synthetic construct
  source 1..16: note = Description of Artificial Sequence: Synthetic peptide; note = XENP023776 vlCDR1
KSSQSIVHSNGNTYLE

SEQ ID NO: 33845 - protein, 7 aa, synthetic construct
  source 1..7: note = Description of Artificial Sequence: Synthetic peptide; note = XENP023776 vlCDR2
KVSNRFS

SEQ ID NO: 33846 - protein, 9 aa, synthetic construct
  source 1..9: note = Description of Artificial Sequence: Synthetic peptide; note = XENP023776 vlCDR3
FQGSHVPNT

SEQ ID NO: 33847 - protein, 251 aa, synthetic construct
  source 1..251: note = Description of Artificial Sequence: Synthetic polypeptide; note = XENP023777 1C11_H3.38_L3_scFv
QIQLVQSGSELKKPGASVKVSCKASGYTFTHYGMNWVRQAPGQGLEWMGWINTYTGEPTYADGITGRFVFSLDTSVSTAYLQISSLKAEDTAVYFCARDYYGSSPYWGQGTLVTVSSGKPGSGKPGSGKPGSGKPGSDVLMTQSPDSLAVSLGERATINCKSSQSIVHSNGNTYLEWYQQKPGQSPKLLIYKVSNRFSGVPDRFSGSGSGTDFTLTISSLQAEDVAVYYCFQGSHVPNTFGGGTKVEIKGS

SEQ ID NO: 33848 - protein, 117 aa, synthetic construct
  source 1..117: note = Description of Artificial Sequence: Synthetic polypeptide; note = VH of XENP023777
QIQLVQSGSELKKPGASVKVSCKASGYTFTHYGMNWVRQAPGQGLEWMGWINTYTGEPTYADGITGRFVFSLDTSVSTAYLQISSLKAEDTAVYFCARDYYGSSPYWGQGTLVTVSS

SEQ ID NO: 33849 - protein, 114 aa, synthetic construct; identical to SEQ ID NO: 33651
  source 1..114: note = Description of Artificial Sequence: Synthetic polypeptide; note = VL of XENP023777

SEQ ID NO: 33850 - protein, 5 aa, synthetic construct
  source 1..5: note = Description of Artificial Sequence: Synthetic peptide; note = XENP023777 vhCDR1
HYGMN

SEQ ID NO: 33851 - protein, 17 aa, synthetic construct
  source 1..17: note = Description of Artificial Sequence: Synthetic peptide; note = XENP023777 vhCDR2
WINTYTGEPTYADGITG

SEQ ID NO: 33852 - protein, 8 aa, synthetic construct
  source 1..8: note = Description of Artificial Sequence: Synthetic peptide; note = XENP023777 vhCDR3
DYYGSSPY

SEQ ID NO: 33853 - protein, 16 aa, synthetic construct
  source 1..16: note = Description of Artificial Sequence: Synthetic peptide; note = XENP023777 vlCDR1
KSSQSIVHSNGNTYLE

SEQ ID NO: 33854 - protein, 7 aa, synthetic construct
  source 1..7: note = Description of Artificial Sequence: Synthetic peptide; note = XENP023777 vlCDR2
KVSNRFS

SEQ ID NO: 33855 - protein, 9 aa, synthetic construct
  source 1..9: note = Description of Artificial Sequence: Synthetic peptide; note = XENP023777 vlCDR3
FQGSHVPNT

SEQ ID NO: 33856 - protein, 251 aa, synthetic construct
  source 1..251: note = Description of Artificial Sequence: Synthetic polypeptide; note = XENP023778 1C11_H3.39_L3_scFv
QIQLVQSGSELKKPGASVKVSCKASGYTFTHYGMNWVRQAPGQGLEWMGWINTYTGEPTYADGLTGRFVFSLDTSVSTAYLQISSLKAEDTAVYFCARDYYGSSPYWGQGTLVTVSSGKPGSGKPGSGKPGSGKPGSDVLMTQSPDSLAVSLGERATINCKSSQSIVHSNGNTYLEWYQQKPGQSPKLLIYKVSNRFSGVPDRFSGSGSGTDFTLTISSLQAEDVAVYYCFQGSHVPNTFGGGTKVEIKGS

SEQ ID NO: 33857 - protein, 117 aa, synthetic construct
  source 1..117: note = Description of Artificial Sequence: Synthetic polypeptide; note = VH of XENP023778
QIQLVQSGSELKKPGASVKVSCKASGYTFTHYGMNWVRQAPGQGLEWMGWINTYTGEPTYADGLTGRFVFSLDTSVSTAYLQISSLKAEDTAVYFCARDYYGSSPYWGQGTLVTVSS

SEQ ID NO: 33858 - protein, 114 aa, synthetic construct; identical to SEQ ID NO: 33651
  source 1..114: note = Description of Artificial Sequence: Synthetic polypeptide; note = VL of XENP023778

SEQ ID NO: 33859 - protein, 5 aa, synthetic construct
  source 1..5: note = Description of Artificial Sequence: Synthetic peptide; note = XENP023778 vhCDR1
HYGMN

SEQ ID NO: 33860 - protein, 17 aa, synthetic construct
  source 1..17: note = Description of Artificial Sequence: Synthetic peptide; note = XENP023778 vhCDR2
WINTYTGEPTYADGLTG

SEQ ID NO: 33861 - protein, 8 aa, synthetic construct
  source 1..8: note = Description of Artificial Sequence: Synthetic peptide; note = XENP023778 vhCDR3
DYYGSSPY

SEQ ID NO: 33862 - protein, 16 aa, synthetic construct
  source 1..16: note = Description of Artificial Sequence: Synthetic peptide; note = XENP023778 vlCDR1
KSSQSIVHSNGNTYLE

SEQ ID NO: 33863 - protein, 7 aa, synthetic construct
  source 1..7: note = Description of Artificial Sequence: Synthetic peptide; note = XENP023778 vlCDR2
KVSNRFS

SEQ ID NO: 33864 - protein, 9 aa, synthetic construct
  source 1..9: note = Description of Artificial Sequence: Synthetic peptide; note = XENP023778 vlCDR3
FQGSHVPNT

SEQ ID NO: 33865 - protein, 251 aa, synthetic construct
  source 1..251: note = Description of Artificial Sequence: Synthetic polypeptide; note = XENP023779 1C11_H3.41_L3_scFv
QIQLVQSGSELKKPGASVKVSCKASGYTFTHYGMNWVRQAPGQGLEWMGWINTYTGEPTYADGFKGRFVFSLDTSVSTAYLQISSLKAEDTAVYFCARDYYGSSPYWGQGTLVTVSSGKPGSGKPGSGKPGSGKPGSDVLMTQSPDSLAVSLGERATINCKSSQSIVHSNGNTYLEWYQQKPGQSPKLLIYKVSNRFSGVPDRFSGSGSGTDFTLTISSLQAEDVAVYYCFQGSHVPNTFGGGTKVEIKGS

SEQ ID NO: 33866 - protein, 117 aa, synthetic construct
  source 1..117: note = Description of Artificial Sequence: Synthetic polypeptide; note = VH of XENP023779
QIQLVQSGSELKKPGASVKVSCKASGYTFTHYGMNWVRQAPGQGLEWMGWINTYTGEPTYADGFKGRFVFSLDTSVSTAYLQISSLKAEDTAVYFCARDYYGSSPYWGQGTLVTVSS

SEQ ID NO: 33867 - protein, 114 aa, synthetic construct; identical to SEQ ID NO: 33651
  source 1..114: note = Description of Artificial Sequence: Synthetic polypeptide; note = VL of XENP023779

SEQ ID NO: 33868 - protein, 5 aa, synthetic construct
  source 1..5: note = Description of Artificial Sequence: Synthetic peptide; note = XENP023779 vhCDR1
HYGMN

SEQ ID NO: 33869 - protein, 17 aa, synthetic construct
  source 1..17: note = Description of Artificial Sequence: Synthetic peptide; note = XENP023779 vhCDR2
WINTYTGEPTYADGFKG

SEQ ID NO: 33870 - protein, 8 aa, synthetic construct
  source 1..8: note = Description of Artificial Sequence: Synthetic peptide; note = XENP023779 vhCDR3
DYYGSSPY

SEQ ID NO: 33871 - protein, 16 aa, synthetic construct
  source 1..16: note = Description of Artificial Sequence: Synthetic peptide; note = XENP023779 vlCDR1
KSSQSIVHSNGNTYLE

SEQ ID NO: 33872 - protein, 7 aa, synthetic construct
  source 1..7: note = Description of Artificial Sequence: Synthetic peptide; note = XENP023779 vlCDR2
KVSNRFS

SEQ ID NO: 33873 - protein, 9 aa, synthetic construct
  source 1..9: note = Description of Artificial Sequence: Synthetic peptide; note = XENP023779 vlCDR3
FQGSHVPNT

SEQ ID NO: 33874 - protein, 251 aa, synthetic construct
  source 1..251: note = Description of Artificial Sequence: Synthetic polypeptide; note = XENP023780 1C11_H3.42_L3_scFv
QIQLVQSGSELKKPGASVKVSCKASGYTFTHYGMNWVRQAPGQGLEWMGWINTYTGEPTYADGFQGRFVFSLDTSVSTAYLQISSLKAEDTAVYFCARDYYGSSPYWGQGTLVTVSSGKPGSGKPGSGKPGSGKPGSDVLMTQSPDSLAVSLGERATINCKSSQSIVHSNGNTYLEWYQQKPGQSPKLLIYKVSNRFSGVPDRFSGSGSGTDFTLTISSLQAEDVAVYYCFQGSHVPNTFGGGTKVEIKGS

SEQ ID NO: 33875 - protein, 117 aa, synthetic construct
  source 1..117: note = Description of Artificial Sequence: Synthetic polypeptide; note = VH of XENP023780
QIQLVQSGSELKKPGASVKVSCKASGYTFTHYGMNWVRQAPGQGLEWMGWINTYTGEPTYADGFQGRFVFSLDTSVSTAYLQISSLKAEDTAVYFCARDYYGSSPYWGQGTLVTVSS

SEQ ID NO: 33876 - protein, 114 aa, synthetic construct; identical to SEQ ID NO: 33651
  source 1..114: note = Description of Artificial Sequence: Synthetic polypeptide; note = VL of XENP023780

SEQ ID NO: 33877 - protein, 5 aa, synthetic construct
  source 1..5: note = Description of Artificial Sequence: Synthetic peptide; note = XENP023780 vhCDR1
HYGMN

SEQ ID NO: 33878 - protein, 17 aa, synthetic construct
  source 1..17: note = Description of Artificial Sequence: Synthetic peptide; note = XENP023780 vhCDR2
WINTYTGEPTYADGFQG

SEQ ID NO: 33879 - protein, 8 aa, synthetic construct
  source 1..8: note = Description of Artificial Sequence: Synthetic peptide; note = XENP023780 vhCDR3
DYYGSSPY

SEQ ID NO: 33880 - protein, 16 aa, synthetic construct
  source 1..16: note = Description of Artificial Sequence: Synthetic peptide; note = XENP023780 vlCDR1
KSSQSIVHSNGNTYLE

SEQ ID NO: 33881 - protein, 7 aa, synthetic construct
  source 1..7: note = Description of Artificial Sequence: Synthetic peptide; note = XENP023780 vlCDR2
KVSNRFS

SEQ ID NO: 33882 - protein, 9 aa, synthetic construct
  source 1..9: note = Description of Artificial Sequence: Synthetic peptide; note = XENP023780 vlCDR3
FQGSHVPNT

SEQ ID NO: 33883 - protein, 251 aa, synthetic construct
  source 1..251: note = Description of Artificial Sequence: Synthetic polypeptide; note = XENP023781 1C11_H3.43_L3_scFv
QIQLVQSGSELKKPGASVKVSCKASGYTFTHYGMNWVRQAPGQGLEWMGWINTYTGEPTYADGFTGRVVFSLDTSVSTAYLQISSLKAEDTAVYFCARDYYGSSPYWGQGTLVTVSSGKPGSGKPGSGKPGSGKPGSDVLMTQSPDSLAVSLGERATINCKSSQSIVHSNGNTYLEWYQQKPGQSPKLLIYKVSNRFSGVPDRFSGSGSGTDFTLTISSLQAEDVAVYYCFQGSHVPNTFGGGTKVEIKGS

SEQ ID NO: 33884 - protein, 117 aa, synthetic construct
  source 1..117: note = Description of Artificial Sequence: Synthetic polypeptide; note = VH of XENP023781
QIQLVQSGSELKKPGASVKVSCKASGYTFTHYGMNWVRQAPGQGLEWMGWINTYTGEPTYADGFTGRVVFSLDTSVSTAYLQISSLKAEDTAVYFCARDYYGSSPYWGQGTLVTVSS

SEQ ID NO: 33885 - protein, 114 aa, synthetic construct; identical to SEQ ID NO: 33651
  source 1..114: note = Description of Artificial Sequence: Synthetic polypeptide; note = VL of XENP023781

SEQ ID NO: 33886 - protein, 5 aa, synthetic construct
  source 1..5: note = Description of Artificial Sequence: Synthetic peptide; note = XENP023781 vhCDR1
HYGMN

SEQ ID NO: 33887 - protein, 17 aa, synthetic construct
  source 1..17: note = Description of Artificial Sequence: Synthetic peptide; note = XENP023781 vhCDR2
WINTYTGEPTYADGFTG

SEQ ID NO: 33888 - protein, 8 aa, synthetic construct
  source 1..8: note = Description of Artificial Sequence: Synthetic peptide; note = XENP023781 vhCDR3
DYYGSSPY

SEQ ID NO: 33889 - protein, 16 aa, synthetic construct
  source 1..16: note = Description of Artificial Sequence: Synthetic peptide; note = XENP023781 vlCDR1
KSSQSIVHSNGNTYLE

SEQ ID NO: 33890 - protein, 7 aa, synthetic construct
  source 1..7: note = Description of Artificial Sequence: Synthetic peptide; note = XENP023781 vlCDR2
KVSNRFS

SEQ ID NO: 33891 - protein, 9 aa, synthetic construct
  source 1..9: note = Description of Artificial Sequence: Synthetic peptide; note = XENP023781 vlCDR3
FQGSHVPNT

SEQ ID NO: 33892 - protein, 251 aa, synthetic construct
  source 1..251: note = Description of Artificial Sequence: Synthetic polypeptide; note = XENP023782 1C11_H3.44_L3_scFv
QIQLVQSGSELKKPGASVKVSCKASGYTFTHYGMNWVRQAPGQGLEWMGWINTYTGEPTYADGFTGRFIFSLDTSVSTAYLQISSLKAEDTAVYFCARDYYGSSPYWGQGTLVTVSSGKPGSGKPGSGKPGSGKPGSDVLMTQSPDSLAVSLGERATINCKSSQSIVHSNGNTYLEWYQQKPGQSPKLLIYKVSNRFSGVPDRFSGSGSGTDFTLTISSLQAEDVAVYYCFQGSHVPNTFGGGTKVEIKGS

SEQ ID NO: 33893 - protein, 117 aa, synthetic construct
  source 1..117: note = Description of Artificial Sequence: Synthetic polypeptide; note = VH of XENP023782
QIQLVQSGSELKKPGASVKVSCKASGYTFTHYGMNWVRQAPGQGLEWMGWINTYTGEPTYADGFTGRFIFSLDTSVSTAYLQISSLKAEDTAVYFCARDYYGSSPYWGQGTLVTVSS

SEQ ID NO: 33894 - protein, 114 aa, synthetic construct; identical to SEQ ID NO: 33651
  source 1..114: note = Description of Artificial Sequence: Synthetic polypeptide; note = VL of XENP023782

SEQ ID NO: 33895 - protein, 5 aa, synthetic construct
  source 1..5: note = Description of Artificial Sequence: Synthetic peptide; note = XENP023782 vhCDR1
HYGMN

SEQ ID NO: 33896 - protein, 17 aa, synthetic construct
  source 1..17: note = Description of Artificial Sequence: Synthetic peptide; note = XENP023782 vhCDR2
WINTYTGEPTYADGFTG

SEQ ID NO: 33897 - protein, 8 aa, synthetic construct
  source 1..8: note = Description of Artificial Sequence: Synthetic peptide; note = XENP023782 vhCDR3
DYYGSSPY

SEQ ID NO: 33898 - protein, 16 aa, synthetic construct
  source 1..16: note = Description of Artificial Sequence: Synthetic peptide; note = XENP023782 vlCDR1
KSSQSIVHSNGNTYLE

SEQ ID NO: 33899 - protein, 7 aa, synthetic construct
  source 1..7: note = Description of Artificial Sequence: Synthetic peptide; note = XENP023782 vlCDR2
KVSNRFS

SEQ ID NO: 33900 - protein, 9 aa, synthetic construct
  source 1..9: note = Description of Artificial Sequence: Synthetic peptide; note = XENP023782 vlCDR3
FQGSHVPNT

SEQ ID NO: 33901 - protein, 251 aa, synthetic construct
  source 1..251: note = Description of Artificial Sequence: Synthetic polypeptide; note = XENP023783 1C11_H3.45_L3_scFv
QIQLVQSGSELKKPGASVKVSCKASGYTFTHYGMNWVRQAPGQGLEWMGWINTYTGEPTYADGFTGRFSFSLDTSVSTAYLQISSLKAEDTAVYFCARDYYGSSPYWGQGTLVTVSSGKPGSGKPGSGKPGSGKPGSDVLMTQSPDSLAVSLGERATINCKSSQSIVHSNGNTYLEWYQQKPGQSPKLLIYKVSNRFSGVPDRFSGSGSGTDFTLTISSLQAEDVAVYYCFQGSHVPNTFGGGTKVEIKGS

SEQ ID NO: 33902 - protein, 117 aa, synthetic construct
  source 1..117: note = Description of Artificial Sequence: Synthetic polypeptide; note = VH of XENP023783
QIQLVQSGSELKKPGASVKVSCKASGYTFTHYGMNWVRQAPGQGLEWMGWINTYTGEPTYADGFTGRFSFSLDTSVSTAYLQISSLKAEDTAVYFCARDYYGSSPYWGQGTLVTVSS

SEQ ID NO: 33903 - protein, 114 aa, synthetic construct; identical to SEQ ID NO: 33651
  source 1..114: note = Description of Artificial Sequence: Synthetic polypeptide; note = VL of XENP023783

SEQ ID NO: 33904 - protein, 5 aa, synthetic construct
  source 1..5: note = Description of Artificial Sequence: Synthetic peptide; note = XENP023783 vhCDR1
HYGMN

SEQ ID NO: 33905 - protein, 17 aa, synthetic construct
  source 1..17: note = Description of Artificial Sequence: Synthetic peptide; note = XENP023783 vhCDR2
WINTYTGEPTYADGFTG

SEQ ID NO: 33906 - protein, 8 aa, synthetic construct
  source 1..8: note = Description of Artificial Sequence: Synthetic peptide; note = XENP023783 vhCDR3
DYYGSSPY

SEQ ID NO: 33907 - protein, 16 aa, synthetic construct
  source 1..16: note = Description of Artificial Sequence: Synthetic peptide; note = XENP023783 vlCDR1
KSSQSIVHSNGNTYLE

SEQ ID NO: 33908 - protein, 7 aa, synthetic construct
  source 1..7: note = Description of Artificial Sequence: Synthetic peptide; note = XENP023783 vlCDR2
KVSNRFS

SEQ ID NO: 33909 - protein, 9 aa, synthetic construct
  source 1..9: note = Description of Artificial Sequence: Synthetic peptide; note = XENP023783 vlCDR3
FQGSHVPNT

SEQ ID NO: 33910 - protein, 251 aa, synthetic construct
  source 1..251: note = Description of Artificial Sequence: Synthetic polypeptide; note = XENP023784 1C11_H3.46_L3_scFv
QIQLVQSGSELKKPGASVKVSCKASGYTFTHYGMNWVRQAPGQGLEWMGWINTYTGEPTYADGFTGRFTFSLDTSVSTAYLQISSLKAEDTAVYFCARDYYGSSPYWGQGTLVTVSSGKPGSGKPGSGKPGSGKPGSDVLMTQSPDSLAVSLGERATINCKSSQSIVHSNGNTYLEWYQQKPGQSPKLLIYKVSNRFSGVPDRFSGSGSGTDFTLTISSLQAEDVAVYYCFQGSHVPNTFGGGTKVEIKGS

SEQ ID NO: 33911 - protein, 117 aa, synthetic construct
  source 1..117: note = Description of Artificial Sequence: Synthetic polypeptide; note = VH of XENP023784
QIQLVQSGSELKKPGASVKVSCKASGYTFTHYGMNWVRQAPGQGLEWMGWINTYTGEPTYADGFTGRFTFSLDTSVSTAYLQISSLKAEDTAVYFCARDYYGSSPYWGQGTLVTVSS

SEQ ID NO: 33912 - protein, 114 aa, synthetic construct; identical to SEQ ID NO: 33651
  source 1..114: note = Description of Artificial Sequence: Synthetic polypeptide; note = VL of XENP023784

SEQ ID NO: 33913 - protein, 5 aa, synthetic construct
  source 1..5: note = Description of Artificial Sequence: Synthetic peptide; note = XENP023784 vhCDR1
HYGMN

SEQ ID NO: 33914 - protein, 17 aa, synthetic construct
  source 1..17: note = Description of Artificial Sequence: Synthetic peptide; note = XENP023784 vhCDR2
WINTYTGEPTYADGFTG

SEQ ID NO: 33915 - protein, 8 aa, synthetic construct
  source 1..8: note = Description of Artificial Sequence: Synthetic peptide; note = XENP023784 vhCDR3
DYYGSSPY

SEQ ID NO: 33916 - protein, 16 aa, synthetic construct
  source 1..16: note = Description of Artificial Sequence: Synthetic peptide; note = XENP023784 vlCDR1
KSSQSIVHSNGNTYLE

SEQ ID NO: 33917 - protein, 7 aa, synthetic construct
  source 1..7: note = Description of Artificial Sequence: Synthetic peptide; note = XENP023784 vlCDR2
KVSNRFS

SEQ ID NO: 33918 - protein, 9 aa, synthetic construct
  source 1..9: note = Description of Artificial Sequence: Synthetic peptide; note = XENP023784 vlCDR3
FQGSHVPNT

SEQ ID NO: 33919 - protein, 251 aa, synthetic construct
  source 1..251: note = Description of Artificial Sequence: Synthetic polypeptide; note = XENP023785 1C11_H3.49_L3_scFv
QIQLVQSGSELKKPGASVKVSCKASGYTFTHYGMNWVRQAPGQGLEWMGWINTYTGEPTYADGFTGRFVMSLDTSVSTAYLQISSLKAEDTAVYFCARDYYGSSPYWGQGTLVTVSSGKPGSGKPGSGKPGSGKPGSDVLMTQSPDSLAVSLGERATINCKSSQSIVHSNGNTYLEWYQQKPGQSPKLLIYKVSNRFSGVPDRFSGSGSGTDFTLTISSLQAEDVAVYYCFQGSHVPNTFGGGTKVEIKGS

SEQ ID NO: 33920 - protein, 117 aa, synthetic construct
  source 1..117: note = Description of Artificial Sequence: Synthetic polypeptide; note = VH of XENP023785
QIQLVQSGSELKKPGASVKVSCKASGYTFTHYGMNWVRQAPGQGLEWMGWINTYTGEPTYADGFTGRFVMSLDTSVSTAYLQISSLKAEDTAVYFCARDYYGSSPYWGQGTLVTVSS

SEQ ID NO: 33921 - protein, 114 aa, synthetic construct; identical to SEQ ID NO: 33651
  source 1..114: note = Description of Artificial Sequence: Synthetic polypeptide; note = VL of XENP023785

SEQ ID NO: 33922 - protein, 5 aa, synthetic construct
  source 1..5: note = Description of Artificial Sequence: Synthetic peptide; note = XENP023785 vhCDR1
HYGMN

SEQ ID NO: 33923 - protein, 17 aa, synthetic construct
  source 1..17: note = Description of Artificial Sequence: Synthetic peptide; note = XENP023785 vhCDR2
WINTYTGEPTYADGFTG

SEQ ID NO: 33924 - protein, 8 aa, synthetic construct
  source 1..8: note = Description of Artificial Sequence: Synthetic peptide; note = XENP023785 vhCDR3
DYYGSSPY

SEQ ID NO: 33925 - protein, 16 aa, synthetic construct
  source 1..16: note = Description of Artificial Sequence: Synthetic peptide; note = XENP023785 vlCDR1
KSSQSIVHSNGNTYLE

SEQ ID NO: 33926 - protein, 7 aa, synthetic construct
  source 1..7: note = Description of Artificial Sequence: Synthetic peptide; note = XENP023785 vlCDR2
KVSNRFS

SEQ ID NO: 33927 - protein, 9 aa, synthetic construct
  source 1..9: note = Description of Artificial Sequence: Synthetic peptide; note = XENP023785 vlCDR3
FQGSHVPNT

SEQ ID NO: 33928 - protein, 251 aa, synthetic construct
  source 1..251: note = Description of Artificial Sequence: Synthetic polypeptide; note = XENP023786 1C11_H3.50_L3_scFv
QIQLVQSGSELKKPGASVKVSCKASGYTFTHYGMNWVRQAPGQGLEWMGWINTYTGEPTYADGFTGRFVFSADTSVSTAYLQISSLKAEDTAVYFCARDYYGSSPYWGQGTLVTVSSGKPGSGKPGSGKPGSGKPGSDVLMTQSPDSLAVSLGERATINCKSSQSIVHSNGNTYLEWYQQKPGQSPKLLIYKVSNRFSGVPDRFSGSGSGTDFTLTISSLQAEDVAVYYCFQGSHVPNTFGGGTKVEIKGS

SEQ ID NO: 33929 - protein, 117 aa, synthetic construct
  source 1..117: note = Description of Artificial Sequence: Synthetic polypeptide; note = VH of XENP023786
QIQLVQSGSELKKPGASVKVSCKASGYTFTHYGMNWVRQAPGQGLEWMGWINTYTGEPTYADGFTGRFVFSADTSVSTAYLQISSLKAEDTAVYFCARDYYGSSPYWGQGTLVTVSS

SEQ ID NO: 33930 - protein, 114 aa, synthetic construct; identical to SEQ ID NO: 33651
  source 1..114: note = Description of Artificial Sequence: Synthetic polypeptide; note = VL of XENP023786

SEQ ID NO: 33931 - protein, 5 aa, synthetic construct
  source 1..5: note = Description of Artificial Sequence: Synthetic peptide; note = XENP023786 vhCDR1
HYGMN

SEQ ID NO: 33932 - protein, 17 aa, synthetic construct
  source 1..17: note = Description of Artificial Sequence: Synthetic peptide; note = XENP023786 vhCDR2
WINTYTGEPTYADGFTG

SEQ ID NO: 33933 - protein, 8 aa, synthetic construct
  source 1..8: note = Description of Artificial Sequence: Synthetic peptide; note = XENP023786 vhCDR3
DYYGSSPY

SEQ ID NO: 33934 - protein, 16 aa, synthetic construct
  source 1..16: note = Description of Artificial Sequence: Synthetic peptide; note = XENP023786 vlCDR1
KSSQSIVHSNGNTYLE

SEQ ID NO: 33935 - protein, 7 aa, synthetic construct
  source 1..7: note = Description of Artificial Sequence: Synthetic peptide; note = XENP023786 vlCDR2
KVSNRFS

SEQ ID NO: 33936 - protein, 9 aa, synthetic construct
  source 1..9: note = Description of Artificial Sequence: Synthetic peptide; note = XENP023786 vlCDR3
FQGSHVPNT

SEQ ID NO: 33937 - protein, 251 aa, synthetic construct
  source 1..251: note = Description of Artificial Sequence: Synthetic polypeptide; note = XENP023787 1C11_H3.51_L3_scFv
QIQLVQSGSELKKPGASVKVSCKASGYTFTHYGMNWVRQAPGQGLEWMGWINTYTGEPTYADGFTGRFVFSVDTSVSTAYLQISSLKAEDTAVYFCARDYYGSSPYWGQGTLVTVSSGKPGSGKPGSGKPGSGKPGSDVLMTQSPDSLAVSLGERATINCKSSQSIVHSNGNTYLEWYQQKPGQSPKLLIYKVSNRFSGVPDRFSGSGSGTDFTLTISSLQAEDVAVYYCFQGSHVPNTFGGGTKVEIKGS

SEQ ID NO: 33938 - protein, 117 aa, synthetic construct
  source 1..117: note = Description of Artificial Sequence: Synthetic polypeptide; note = VH of XENP023787
QIQLVQSGSELKKPGASVKVSCKASGYTFTHYGMNWVRQAPGQGLEWMGWINTYTGEPTYADGFTGRFVFSVDTSVSTAYLQISSLKAEDTAVYFCARDYYGSSPYWGQGTLVTVSS

SEQ ID NO: 33939 - protein, 114 aa, synthetic construct; identical to SEQ ID NO: 33651
  source 1..114: note = Description of Artificial Sequence: Synthetic polypeptide; note = VL of XENP023787

SEQ ID NO: 33940 - protein, 5 aa, synthetic construct
  source 1..5: note = Description of Artificial Sequence: Synthetic peptide; note = XENP023787 vhCDR1
HYGMN

SEQ ID NO: 33941 - protein, 17 aa, synthetic construct
  source 1..17: note = Description of Artificial Sequence: Synthetic peptide; note = XENP023787 vhCDR2
WINTYTGEPTYADGFTG

SEQ ID NO: 33942 - protein, 8 aa, synthetic construct
  source 1..8: note = Description of Artificial Sequence: Synthetic peptide; note = XENP023787 vhCDR3
DYYGSSPY

SEQ ID NO: 33943 - protein, 16 aa, synthetic construct
  source 1..16: note = Description of Artificial Sequence: Synthetic peptide; note = XENP023787 vlCDR1
KSSQSIVHSNGNTYLE

SEQ ID NO: 33944 - protein, 7 aa, synthetic construct
  source 1..7: note = Description of Artificial Sequence: Synthetic peptide; note = XENP023787 vlCDR2
KVSNRFS

SEQ ID NO: 33945 - protein, 9 aa, synthetic construct
  source 1..9: note = Description of Artificial Sequence: Synthetic peptide; note = XENP023787 vlCDR3
FQGSHVPNT

SEQ ID NO: 33946 - protein, 251 aa, synthetic construct
  source 1..251: note = Description of Artificial Sequence: Synthetic polypeptide; note = XENP023788 1C11_H3.54_L3_scFv
QIQLVQSGSELKKPGASVKVSCKASGYTFTHYGMNWVRQAPGQGLEWMGWINTYTGEPTYADGFTGRVTMTADTSVSTAYLQISSLKAEDTAVYFCARDYYGSSPYWGQGTLVTVSSGKPGSGKPGSGKPGSGKPGSDVLMTQSPDSLAVSLGERATINCKSSQSIVHSNGNTYLEWYQQKPGQSPKLLIYKVSNRFSGVPDRFSGSGSGTDFTLTISSLQAEDVAVYYCFQGSHVPNTFGGGTKVEIKGS

SEQ ID NO: 33947 - protein, 117 aa, synthetic construct
  source 1..117: note = Description of Artificial Sequence: Synthetic polypeptide; note = VH of XENP023788
QIQLVQSGSELKKPGASVKVSCKASGYTFTHYGMNWVRQAPGQGLEWMGWINTYTGEPTYADGFTGRVTMTADTSVSTAYLQISSLKAEDTAVYFCARDYYGSSPYWGQGTLVTVSS

SEQ ID NO: 33948 - protein, 114 aa, synthetic construct; identical to SEQ ID NO: 33651
  source 1..114: note = Description of Artificial Sequence: Synthetic polypeptide; note = VL of XENP023788

SEQ ID NO: 33949 - protein, 5 aa, synthetic construct
  source 1..5: note = Description of Artificial Sequence: Synthetic peptide; note = XENP023788 vhCDR1
HYGMN

SEQ ID NO: 33950 - protein, 17 aa, synthetic construct
  source 1..17: note = Description of Artificial Sequence: Synthetic peptide; note = XENP023788 vhCDR2
WINTYTGEPTYADGFTG

SEQ ID NO: 33951 - protein, 8 aa, synthetic construct
  source 1..8: note = Description of Artificial Sequence: Synthetic peptide; note = XENP023788 vhCDR3
DYYGSSPY

SEQ ID NO: 33952 - protein, 16 aa, synthetic construct
  source 1..16: note = Description of Artificial Sequence: Synthetic peptide; note = XENP023788 vlCDR1
KSSQSIVHSNGNTYLE

SEQ ID NO: 33953 - protein, 7 aa, synthetic construct
  source 1..7: note = Description of Artificial Sequence: Synthetic peptide; note = XENP023788 vlCDR2
KVSNRFS

SEQ ID NO: 33954 - protein, 9 aa, synthetic construct
  source 1..9: note = Description of Artificial Sequence: Synthetic peptide; note = XENP023788 vlCDR3
FQGSHVPNT

SEQ ID NO: 33955 - protein, 251 aa, synthetic construct
  source 1..251: note = Description of Artificial Sequence: Synthetic polypeptide; note = XENP023789 1C11_H3.55_L3_scFv
QIQLVQSGSELKKPGASVKVSCKASGYTFTHYGMNWVRQAPGQGLEWMGWINTYTGEPTYADGFTGRFVFSLDKSVSTAYLQISSLKAEDTAVYFCARDYYGSSPYWGQGTLVTVSSGKPGSGKPGSGKPGSGKPGSDVLMTQSPDSLAVSLGERATINCKSSQSIVHSNGNTYLEWYQQKPGQSPKLLIYKVSNRFSGVPDRFSGSGSGTDFTLTISSLQAEDVAVYYCFQGSHVPNTFGGGTKVEIKGS

SEQ ID NO: 33956 - protein, 117 aa, synthetic construct
  source 1..117: note = Description of Artificial Sequence: Synthetic polypeptide; note = VH of XENP023789
QIQLVQSGSELKKPGASVKVSCKASGYTFTHYGMNWVRQAPGQGLEWMGWINTYTGEPTYADGFTGRFVFSLDKSVSTAYLQISSLKAEDTAVYFCARDYYGSSPYWGQGTLVTVSS

SEQ ID NO: 33957 - protein, 114 aa, synthetic construct; identical to SEQ ID NO: 33651
  source 1..114: note = Description of Artificial Sequence: Synthetic polypeptide; note = VL of XENP023789

SEQ ID NO: 33958 - protein, 5 aa, synthetic construct
  source 1..5: note = Description of Artificial Sequence: Synthetic peptide; note = XENP023789 vhCDR1
HYGMN

SEQ ID NO: 33959 - protein, 17 aa, synthetic construct
  source 1..17: note = Description of Artificial Sequence: Synthetic peptide; note = XENP023789 vhCDR2
WINTYTGEPTYADGFTG

SEQ ID NO: 33960 - protein, 8 aa, synthetic construct
  source 1..8: note = Description of Artificial Sequence: Synthetic peptide; note = XENP023789 vhCDR3
DYYGSSPY

SEQ ID NO: 33961 - protein, 16 aa, synthetic construct
  source 1..16: note = Description of Artificial Sequence: Synthetic peptide; note = XENP023789 vlCDR1
KSSQSIVHSNGNTYLE

SEQ ID NO: 33962 - protein, 7 aa, synthetic construct
  source 1..7: note = Description of Artificial Sequence: Synthetic peptide; note = XENP023789 vlCDR2
KVSNRFS

SEQ ID NO: 33963 - protein, 9 aa, synthetic construct
  source 1..9: note = Description of Artificial Sequence: Synthetic peptide; note = XENP023789 vlCDR3
FQGSHVPNT

SEQ ID NO: 33964 - protein, 251 aa, synthetic construct
  source 1..251: note = Description of Artificial Sequence: Synthetic polypeptide; note = XENP023790 1C11_H3.56_L3_scFv
QIQLVQSGSELKKPGASVKVSCKASGYTFTHYGMNWVRQAPGQGLEWMGWINTYTGEPTYADGFTGRFVFSLDTSASTAYLQISSLKAEDTAVYFCARDYYGSSPYWGQGTLVTVSSGKPGSGKPGSGKPGSGKPGSDVLMTQSPDSLAVSLGERATINCKSSQSIVHSNGNTYLEWYQQKPGQSPKLLIYKVSNRFSGVPDRFSGSGSGTDFTLTISSLQAEDVAVYYCFQGSHVPNTFGGGTKVEIKGS

SEQ ID NO: 33965 - protein, 117 aa, synthetic construct
  source 1..117: note = Description of Artificial Sequence: Synthetic polypeptide; note = VH of XENP023790
QIQLVQSGSELKKPGASVKVSCKASGYTFTHYGMNWVRQAPGQGLEWMGWINTYTGEPTYADGFTGRFVFSLDTSASTAYLQISSLKAEDTAVYFCARDYYGSSPYWGQGTLVTVSS

SEQ ID NO: 33966 - protein, 114 aa, synthetic construct; identical to SEQ ID NO: 33651
  source 1..114: note = Description of Artificial Sequence: Synthetic polypeptide; note = VL of XENP023790

SEQ ID NO: 33967 - protein, 5 aa, synthetic construct
  source 1..5: note = Description of Artificial Sequence: Synthetic peptide; note = XENP023790 vhCDR1
HYGMN

SEQ ID NO: 33968 - protein, 17 aa, synthetic construct
  source 1..17: note = Description of Artificial Sequence: Synthetic peptide; note = XENP023790 vhCDR2
WINTYTGEPTYADGFTG

SEQ ID NO: 33969 - protein, 8 aa, synthetic construct
  source 1..8: note = Description of Artificial Sequence: Synthetic peptide; note = XENP023790 vhCDR3
DYYGSSPY

SEQ ID NO: 33970 - protein, 16 aa, synthetic construct
  source 1..16: note = Description of Artificial Sequence: Synthetic peptide; note = XENP023790 vlCDR1
KSSQSIVHSNGNTYLE

SEQ ID NO: 33971 - protein, 7 aa, synthetic construct
  source 1..7: note = Description of Artificial Sequence: Synthetic peptide; note = XENP023790 vlCDR2
KVSNRFS

SEQ ID NO: 33972 - protein, 9 aa, synthetic construct
  source 1..9: note = Description of Artificial Sequence: Synthetic peptide; note = XENP023790 vlCDR3
FQGSHVPNT

SEQ ID NO: 33973 - protein, 251 aa, synthetic construct
  source 1..251: note = Description of Artificial Sequence: Synthetic polypeptide; note = XENP023791 1C11_H3.57_L3_scFv
QIQLVQSGSELKKPGASVKVSCKASGYTFTHYGMNWVRQAPGQGLEWMGWINTYTGEPTYADGFTGRFVFSLDTSISTAYLQISSLKAEDTAVYFCARDYYGSSPYWGQGTLVTVSSGKPGSGKPGSGKPGSGKPGSDVLMTQSPDSLAVSLGERATINCKSSQSIVHSNGNTYLEWYQQKPGQSPKLLIYKVSNRFSGVPDRFSGSGSGTDFTLTISSLQAEDVAVYYCFQGSHVPNTFGGGTKVEIKGS

SEQ ID NO: 33974 - protein, 117 aa, synthetic construct
  source 1..117: note = Description of Artificial Sequence: Synthetic polypeptide; note = VH of XENP023791
QIQLVQSGSELKKPGASVKVSCKASGYTFTHYGMNWVRQAPGQGLEWMGWINTYTGEPTYADGFTGRFVFSLDTSISTAYLQISSLKAEDTAVYFCARDYYGSSPYWGQGTLVTVSS

SEQ ID NO: 33975 - protein, 114 aa, synthetic construct; identical to SEQ ID NO: 33651
  source 1..114: note = Description of Artificial Sequence: Synthetic polypeptide; note = VL of XENP023791

SEQ ID NO: 33976 - protein, 5 aa, synthetic construct
  source 1..5: note = Description of Artificial Sequence: Synthetic peptide; note = XENP023791 vhCDR1
HYGMN

SEQ ID NO: 33977 - protein, 17 aa, synthetic construct
  source 1..17: note = Description of Artificial Sequence: Synthetic peptide; note = XENP023791 vhCDR2
WINTYTGEPTYADGFTG

SEQ ID NO: 33978 - protein, 8 aa, synthetic construct
  source 1..8: note = Description of Artificial Sequence: Synthetic peptide; note = XENP023791 vhCDR3
DYYGSSPY

SEQ ID NO: 33979 - protein, 16 aa, synthetic construct
  source 1..16: note = Description of Artificial Sequence: Synthetic peptide; note = XENP023791 vlCDR1
KSSQSIVHSNGNTYLE

SEQ ID NO: 33980 - protein, 7 aa, synthetic construct
  source 1..7: note = Description of Artificial Sequence: Synthetic peptide; note = XENP023791 vlCDR2
KVSNRFS

SEQ ID NO: 33981 - protein, 9 aa, synthetic construct
  source 1..9: note = Description of Artificial Sequence: Synthetic peptide; note = XENP023791 vlCDR3
FQGSHVPNT

SEQ ID NO: 33982 - protein, 251 aa, synthetic construct
  source 1..251: note = Description of Artificial Sequence: Synthetic polypeptide; note = XENP023792 1C11_H3.58_L3_scFv
QIQLVQSGSELKKPGASVKVSCKASGYTFTHYGMNWVRQAPGQGLEWMGWINTYTGEPTYADGFTGRFVFSLDTSKSTAYLQISSLKAEDTAVYFCARDYYGSSPYWGQGTLVTVSSGKPGSGKPGSGKPGSGKPGSDVLMTQSPDSLAVSLGERATINCKSSQSIVHSNGNTYLEWYQQKPGQSPKLLIYKVSNRFSGVPDRFSGSGSGTDFTLTISSLQAEDVAVYYCFQGSHVPNTFGGGTKVEIKGS

SEQ ID NO: 33983 - protein, 117 aa, synthetic construct
  source 1..117: note = Description of Artificial Sequence: Synthetic polypeptide; note = VH of XENP023792
QIQLVQSGSELKKPGASVKVSCKASGYTFTHYGMNWVRQAPGQGLEWMGWINTYTGEPTYADGFTGRFVFSLDTSKSTAYLQISSLKAEDTAVYFCARDYYGSSPYWGQGTLVTVSS

SEQ ID NO: 33984 - protein, 114 aa, synthetic construct; identical to SEQ ID NO: 33651
  source 1..114: note = Description of Artificial Sequence: Synthetic polypeptide; note = VL of XENP023792

SEQ ID NO: 33985 - protein, 5 aa, synthetic construct
  source 1..5: note = Description of Artificial Sequence: Synthetic peptide; note = XENP023792 vhCDR1
HYGMN

SEQ ID NO: 33986 - protein, 17 aa, synthetic construct
  source 1..17: note = Description of Artificial Sequence: Synthetic peptide; note = XENP023792 vhCDR2
WINTYTGEPTYADGFTG

SEQ ID NO: 33987 - protein, 8 aa, synthetic construct
  source 1..8: note = Description of Artificial Sequence: Synthetic peptide; note = XENP023792 vhCDR3
DYYGSSPY

SEQ ID NO: 33988 - protein, 16 aa, synthetic construct
  source 1..16: note = Description of Artificial Sequence: Synthetic peptide; note = XENP023792 vlCDR1
KSSQSIVHSNGNTYLE

SEQ ID NO: 33989 - protein, 7 aa, synthetic construct
  source 1..7: note = Description of Artificial Sequence: Synthetic peptide; note = XENP023792 vlCDR2
KVSNRFS

SEQ ID NO: 33990 - protein, 9 aa, synthetic construct
  source 1..9: note = Description of Artificial Sequence: Synthetic peptide; note = XENP023792 vlCDR3
FQGSHVPNT

SEQ ID NO: 33991 - protein, 251 aa, synthetic construct
  source 1..251: note = Description of Artificial Sequence: Synthetic polypeptide; note = XENP023793 1C11_H3.59_L3_scFv
QIQLVQSGSELKKPGASVKVSCKASGYTFTHYGMNWVRQAPGQGLEWMGWINTYTGEPTYADGFTGRFVFSLDTSQSTAYLQISSLKAEDTAVYFCARDYYGSSPYWGQGTLVTVSSGKPGSGKPGSGKPGSGKPGSDVLMTQSPDSLAVSLGERATINCKSSQSIVHSNGNTYLEWYQQKPGQSPKLLIYKVSNRFSGVPDRFSGSGSGTDFTLTISSLQAEDVAVYYCFQGSHVPNTFGGGTKVEIKGS

SEQ ID NO: 33992 - protein, 117 aa, synthetic construct
  source 1..117: note = Description of Artificial Sequence: Synthetic polypeptide; note = VH of XENP023793
QIQLVQSGSELKKPGASVKVSCKASGYTFTHYGMNWVRQAPGQGLEWMGWINTYTGEPTYADGFTGRFVFSLDTSQSTAYLQISSLKAEDTAVYFCARDYYGSSPYWGQGTLVTVSS

SEQ ID NO: 33993 - protein, 114 aa, synthetic construct; identical to SEQ ID NO: 33651
  source 1..114: note = Description of Artificial Sequence: Synthetic polypeptide; note = VL of XENP023793

SEQ ID NO: 33994 - protein, 5 aa, synthetic construct
  source 1..5: note = Description of Artificial Sequence: Synthetic peptide; note = XENP023793 vhCDR1
HYGMN

SEQ ID NO: 33995 - protein, 17 aa, synthetic construct
  source 1..17: note = Description of Artificial Sequence: Synthetic peptide; note = XENP023793 vhCDR2
WINTYTGEPTYADGFTG

SEQ ID NO: 33996 - protein, 8 aa, synthetic construct
  source 1..8: note = Description of Artificial Sequence: Synthetic peptide; note = XENP023793 vhCDR3
DYYGSSPY

SEQ ID NO: 33997 - protein, 16 aa, synthetic construct
  source 1..16: note = Description of Artificial Sequence: Synthetic peptide; note = XENP023793 vlCDR1
KSSQSIVHSNGNTYLE

SEQ ID NO: 33998 - protein, 7 aa, synthetic construct
  source 1..7: note = Description of Artificial Sequence: Synthetic peptide; note = XENP023793 vlCDR2
KVSNRFS

SEQ ID NO: 33999 - protein, 9 aa, synthetic construct
  source 1..9: note = Description of Artificial Sequence: Synthetic peptide; note = XENP023793 vlCDR3
FQGSHVPNT

SEQ ID NO: 34000 - protein, 251 aa, synthetic construct
  source 1..251: note = Description of Artificial Sequence: Synthetic polypeptide; note = XENP023794 1C11_H3.60_L3_scFv
QIQLVQSGSELKKPGASVKVSCKASGYTFTHYGMNWVRQAPGQGLEWMGWINTYTGEPTYADGFTGRFVFSLDTSTSTAYLQISSLKAEDTAVYFCARDYYGSSPYWGQGTLVTVSSGKPGSGKPGSGKPGSGKPGSDVLMTQSPDSLAVSLGERATINCKSSQSIVHSNGNTYLEWYQQKPGQSPKLLIYKVSNRFSGVPDRFSGSGSGTDFTLTISSLQAEDVAVYYCFQGSHVPNTFGGGTKVEIKGS

SEQ ID NO: 34001 - protein, 117 aa, synthetic construct
  source 1..117: note = Description of Artificial Sequence: Synthetic polypeptide; note = VH of XENP023794
QIQLVQSGSELKKPGASVKVSCKASGYTFTHYGMNWVRQAPGQGLEWMGWINTYTGEPTYADGFTGRFVFSLDTSTSTAYLQISSLKAEDTAVYFCARDYYGSSPYWGQGTLVTVSS

SEQ ID NO: 34002 - protein, 114 aa, synthetic construct; identical to SEQ ID NO: 33651
  source 1..114: note = Description of Artificial Sequence: Synthetic polypeptide; note = VL of XENP023794

SEQ ID NO: 34003 - protein, 5 aa, synthetic construct
  source 1..5: note = Description of Artificial Sequence: Synthetic peptide; note = XENP023794 vhCDR1
HYGMN

SEQ ID NO: 34004 - protein, 17 aa, synthetic construct
  source 1..17: note = Description of Artificial Sequence: Synthetic peptide; note = XENP023794 vhCDR2
WINTYTGEPTYADGFTG

SEQ ID NO: 34005 - protein, 8 aa, synthetic construct
  source 1..8: note = Description of Artificial Sequence: Synthetic peptide; note = XENP023794 vhCDR3
DYYGSSPY

SEQ ID NO: 34006 - protein, 16 aa, synthetic construct
  source 1..16: note = Description of Artificial Sequence: Synthetic peptide; note = XENP023794 vlCDR1
KSSQSIVHSNGNTYLE

SEQ ID NO: 34007 - protein, 7 aa, synthetic construct
  source 1..7: note = Description of Artificial Sequence: Synthetic peptide; note = XENP023794 vlCDR2
KVSNRFS

SEQ ID NO: 34008 - protein, 9 aa, synthetic construct
  source 1..9: note = Description of Artificial Sequence: Synthetic peptide; note = XENP023794 vlCDR3
FQGSHVPNT

SEQ ID NO: 34009 - protein, 251 aa, synthetic construct
  source 1..251: note = Description of Artificial Sequence: Synthetic polypeptide; note = XENP023795 1C11_H3.61_L3_scFv
QIQLVQSGSELKKPGASVKVSCKASGYTFTHYGMNWVRQAPGQGLEWMGWINTYTGEPTYADGFTGRFVFSLDTSSSTAYLQISSLKAEDTAVYFCARDYYGSSPYWGQGTLVTVSSGKPGSGKPGSGKPGSGKPGSDVLMTQSPDSLAVSLGERATINCKSSQSIVHSNGNTYLEWYQQKPGQSPKLLIYKVSNRFSGVPDRFSGSGSGTDFTLTISSLQAEDVAVYYCFQGSHVPNTFGGGTKVEIKGS

SEQ ID NO: 34010 - protein, 117 aa, synthetic construct
  source 1..117: note = Description of Artificial Sequence: Synthetic polypeptide; note = VH of XENP023795
QIQLVQSGSELKKPGASVKVSCKASGYTFTHYGMNWVRQAPGQGLEWMGWINTYTGEPTYADGFTGRFVFSLDTSSSTAYLQISSLKAEDTAVYFCARDYYGSSPYWGQGTLVTVSS

SEQ ID NO: 34011 - protein, 114 aa, synthetic construct; identical to SEQ ID NO: 33651
  source 1..114: note = Description of Artificial Sequence: Synthetic polypeptide; note = VL of XENP023795

SEQ ID NO: 34012 - protein, 5 aa, synthetic construct
  source 1..5: note = Description of Artificial Sequence: Synthetic peptide; note = XENP023795 vhCDR1
HYGMN

SEQ ID NO: 34013 - protein, 17 aa, synthetic construct
  source 1..17: note = Description of Artificial Sequence: Synthetic peptide; note = XENP023795 vhCDR2
WINTYTGEPTYADGFTG

SEQ ID NO: 34014 - protein, 8 aa, synthetic construct
  source 1..8: note = Description of Artificial Sequence: Synthetic peptide; note = XENP023795 vhCDR3
DYYGSSPY

SEQ ID NO: 34015 - protein, 16 aa, synthetic construct
  source 1..16: note = Description of Artificial Sequence: Synthetic peptide; note = XENP023795 vlCDR1
KSSQSIVHSNGNTYLE

SEQ ID NO: 34016 - protein, 7 aa, synthetic construct
  source 1..7: note = Description of Artificial Sequence: Synthetic peptide; note = XENP023795 vlCDR2
KVSNRFS

SEQ ID NO: 34017 - protein, 9 aa, synthetic construct
  source 1..9: note = Description of Artificial Sequence: Synthetic peptide; note = XENP023795 vlCDR3
FQGSHVPNT

SEQ ID NO: 34018 - protein, 251 aa, synthetic construct
  source 1..251: note = Description of Artificial Sequence: Synthetic polypeptide; note = XENP023796 1C11_H3.62_L3_scFv
QIQLVQSGSELKKPGASVKVSCKASGYTFTHYGMNWVRQAPGQGLEWMGWINTYTGEPTYADGFTGRFVFSLDTSVSTIYLQISSLKAEDTAVYFCARDYYGSSPYWGQGTLVTVSSGKPGSGKPGSGKPGSGKPGSDVLMTQSPDSLAVSLGERATINCKSSQSIVHSNGNTYLEWYQQKPGQSPKLLIYKVSNRFSGVPDRFSGSGSGTDFTLTISSLQAEDVAVYYCFQGSHVPNTFGGGTKVEIKGS

SEQ ID NO: 34019 - protein, 117 aa, synthetic construct
  source 1..117: note = Description of Artificial Sequence: Synthetic polypeptide; note = VH of XENP023796
QIQLVQSGSELKKPGASVKVSCKASGYTFTHYGMNWVRQAPGQGLEWMGWINTYTGEPTYADGFTGRFVFSLDTSVSTIYLQISSLKAEDTAVYFCARDYYGSSPYWGQGTLVTVSS

SEQ ID NO: 34020 - protein, 114 aa, synthetic construct; identical to SEQ ID NO: 33651
  source 1..114: note = Description of Artificial Sequence: Synthetic polypeptide; note = VL of XENP023796

SEQ ID NO: 34021 - protein, 5 aa, synthetic construct
  source 1..5: note = Description of Artificial Sequence: Synthetic peptide; note = XENP023796 vhCDR1
HYGMN

SEQ ID NO: 34022 - protein, 17 aa, synthetic construct
  source 1..17: note = Description of Artificial Sequence: Synthetic peptide; note = XENP023796 vhCDR2
WINTYTGEPTYADGFTG

SEQ ID NO: 34023 - protein, 8 aa, synthetic construct
  source 1..8: note = Description of Artificial Sequence: Synthetic peptide; note = XENP023796 vhCDR3
DYYGSSPY

SEQ ID NO: 34024 - protein, 16 aa, synthetic construct
  source 1..16: note = Description of Artificial Sequence: Synthetic peptide; note = XENP023796 vlCDR1
KSSQSIVHSNGNTYLE

SEQ ID NO: 34025 - protein, 7 aa, synthetic construct
  source 1..7: note = Description of Artificial Sequence: Synthetic peptide; note = XENP023796 vlCDR2
KVSNRFS

SEQ ID NO: 34026 - protein, 9 aa, synthetic construct
  source 1..9: note = Description of Artificial Sequence: Synthetic peptide; note = XENP023796 vlCDR3
FQGSHVPNT

SEQ ID NO: 34027 - protein, 251 aa, synthetic construct
  source 1..251: note = Description of Artificial Sequence: Synthetic polypeptide; note = XENP023801 1C11_H3.64_L3_scFv
QIQLVQSGSELKKPGASVKVSCKASGYTFTHYGMNWVRQAPGQGLEWMGWINTYTGEPTYADGFTGRFVFSLDTSVSTVYLQISSLKAEDTAVYFCARDYYGSSPYWGQGTLVTVSSGKPGSGKPGSGKPGSGKPGSDVLMTQSPDSLAVSLGERATINCKSSQSIVHSNGNTYLEWYQQKPGQSPKLLIYKVSNRFSGVPDRFSGSGSGTDFTLTISSLQAEDVAVYYCFQGSHVPNTFGGGTKVEIKGS

SEQ ID NO: 34028 - protein, 117 aa, synthetic construct
  source 1..117: note = Description of Artificial Sequence: Synthetic polypeptide; note = VH of XENP023801
QIQLVQSGSELKKPGASVKVSCKASGYTFTHYGMNWVRQAPGQGLEWMGWINTYTGEPTYADGFTGRFVFSLDTSVSTVYLQISSLKAEDTAVYFCARDYYGSSPYWGQGTLVTVSS

SEQ ID NO: 34029 - protein, 114 aa, synthetic construct; identical to SEQ ID NO: 33651
  source 1..114: note = Description of Artificial Sequence: Synthetic polypeptide; note = VL of XENP023801

SEQ ID NO: 34030 - protein, 5 aa, synthetic construct
  source 1..5: note = Description of Artificial Sequence: Synthetic peptide; note = XENP023801 vhCDR1
HYGMN

SEQ ID NO: 34031 - protein, 17 aa, synthetic construct
  source 1..17: note = Description of Artificial Sequence: Synthetic peptide; note = XENP023801 vhCDR2
WINTYTGEPTYADGFTG

SEQ ID NO: 34032 - protein, 8 aa, synthetic construct
  source 1..8: note = Description of Artificial Sequence: Synthetic peptide; note = XENP023801 vhCDR3
DYYGSSPY

SEQ ID NO: 34033 - protein, 16 aa, synthetic construct
  source 1..16: note = Description of Artificial Sequence: Synthetic peptide; note = XENP023801 vlCDR1
KSSQSIVHSNGNTYLE

SEQ ID NO: 34034 - protein, 7 aa, synthetic construct
  source 1..7: note = Description of Artificial Sequence: Synthetic peptide; note = XENP023801 vlCDR2
KVSNRFS

SEQ ID NO: 34035 - protein, 9 aa, synthetic construct
  source 1..9: note = Description of Artificial Sequence: Synthetic peptide; note = XENP023801 vlCDR3
FQGSHVPNT

SEQ ID NO: 34036 - protein, 251 aa, synthetic construct
  source 1..251: note = Description of Artificial Sequence: Synthetic polypeptide; note = XENP023802 1C11_H3.65_L3_scFv
QIQLVQSGSELKKPGASVKVSCKASGYTFTHYGMNWVRQAPGQGLEWMGWINTYTGEPTYADGFTGRFVFSLDTSVSTAYMQISSLKAEDTAVYFCARDYYGSSPYWGQGTLVTVSSGKPGSGKPGSGKPGSGKPGSDVLMTQSPDSLAVSLGERATINCKSSQSIVHSNGNTYLEWYQQKPGQSPKLLIYKVSNRFSGVPDRFSGSGSGTDFTLTISSLQAEDVAVYYCFQGSHVPNTFGGGTKVEIKGS

SEQ ID NO: 34037 - protein, 117 aa, synthetic construct
  source 1..117: note = Description of Artificial Sequence: Synthetic polypeptide; note = VH of XENP023802
QIQLVQSGSELKKPGASVKVSCKASGYTFTHYGMNWVRQAPGQGLEWMGWINTYTGEPTYADGFTGRFVFSLDTSVSTAYMQISSLKAEDTAVYFCARDYYGSSPYWGQGTLVTVSS

SEQ ID NO: 34038 - protein, 114 aa, synthetic construct; identical to SEQ ID NO: 33651
  source 1..114: note = Description of Artificial Sequence: Synthetic polypeptide; note = VL of XENP023802

SEQ ID NO: 34039 - protein, 5 aa, synthetic construct
  source 1..5: note = Description of Artificial Sequence: Synthetic peptide; note = XENP023802 vhCDR1
HYGMN

SEQ ID NO: 34040 - protein, 17 aa, synthetic construct
  source 1..17: note = Description of Artificial Sequence: Synthetic peptide; note = XENP023802 vhCDR2
WINTYTGEPTYADGFTG

SEQ ID NO: 34041 - protein, 8 aa, synthetic construct
  source 1..8: note = Description of Artificial Sequence: Synthetic peptide; note = XENP023802 vhCDR3
DYYGSSPY

SEQ ID NO: 34042 - protein, 16 aa, synthetic construct
  source 1..16: note = Description of Artificial Sequence: Synthetic peptide; note = XENP023802 vlCDR1
KSSQSIVHSNGNTYLE

SEQ ID NO: 34043 - protein, 7 aa, synthetic construct
  source 1..7: note = Description of Artificial Sequence: Synthetic peptide; note = XENP023802 vlCDR2
KVSNRFS

SEQ ID NO: 34044 - protein, 9 aa, synthetic construct
  source 1..9: note = Description of Artificial Sequence: Synthetic peptide; note = XENP023802 vlCDR3
FQGSHVPNT

SEQ ID NO: 34045 - protein, 251 aa, synthetic construct
  source 1..251: note = Description of Artificial Sequence: Synthetic polypeptide; note = XENP023803 1C11_H3.66_L3_scFv
QIQLVQSGSELKKPGASVKVSCKASGYTFTHYGMNWVRQAPGQGLEWMGWINTYTGEPTYADGFTGRFVFSLDTSVSTAYMELSSLKAEDTAVYFCARDYYGSSPYWGQGTLVTVSSGKPGSGKPGSGKPGSGKPGSDVLMTQSPDSLAVSLGERATINCKSSQSIVHSNGNTYLEWYQQKPGQSPKLLIYKVSNRFSGVPDRFSGSGSGTDFTLTISSLQAEDVAVYYCFQGSHVPNTFGGGTKVEIKGS

SEQ ID NO: 34046 - protein, 117 aa, synthetic construct
  source 1..117: note = Description of Artificial Sequence: Synthetic polypeptide; note = VH of XENP023803
QIQLVQSGSELKKPGASVKVSCKASGYTFTHYGMNWVRQAPGQGLEWMGWINTYTGEPTYADGFTGRFVFSLDTSVSTAYMELSSLKAEDTAVYFCARDYYGSSPYWGQGTLVTVSS

SEQ ID NO: 34047 - protein, 114 aa, synthetic construct; identical to SEQ ID NO: 33651
  source 1..114: note = Description of Artificial Sequence: Synthetic polypeptide; note = VL of XENP023803

SEQ ID NO: 34048 - protein, 5 aa, synthetic construct
  source 1..5: note = Description of Artificial Sequence: Synthetic peptide; note = XENP023803 vhCDR1
HYGMN

SEQ ID NO: 34049 - protein, 17 aa, synthetic construct
  source 1..17: note = Description of Artificial Sequence: Synthetic peptide; note = XENP023803 vhCDR2
WINTYTGEPTYADGFTG

SEQ ID NO: 34050 - protein, 8 aa, synthetic construct
  source 1..8: note = Description of Artificial Sequence: Synthetic peptide; note = XENP023803 vhCDR3
DYYGSSPY

SEQ ID NO: 34051 - protein, 16 aa, synthetic construct
  source 1..16: note = Description of Artificial Sequence: Synthetic peptide; note = XENP023803 vlCDR1
KSSQSIVHSNGNTYLE

SEQ ID NO: 34052 - protein, 7 aa, synthetic construct
  source 1..7: note = Description of Artificial Sequence: Synthetic peptide; note = XENP023803 vlCDR2
KVSNRFS

SEQ ID NO: 34053 - protein, 9 aa, synthetic construct
  source 1..9: note = Description of Artificial Sequence: Synthetic peptide; note = XENP023803 vlCDR3
FQGSHVPNT

SEQ ID NO: 34054 - protein, 251 aa, synthetic construct
  source 1..251: note = Description of Artificial Sequence: Synthetic polypeptide; note = XENP023804 1C11_H3.67_L3_scFv
QIQLVQSGSELKKPGASVKVSCKASGYTFTHYGMNWVRQAPGQGLEWMGWINTYTGEPTYADGFTGRFVFSLDTSVSTAYLQLSSLKAEDTAVYFCARDYYGSSPYWGQGTLVTVSSGKPGSGKPGSGKPGSGKPGSDVLMTQSPDSLAVSLGERATINCKSSQSIVHSNGNTYLEWYQQKPGQSPKLLIYKVSNRFSGVPDRFSGSGSGTDFTLTISSLQAEDVAVYYCFQGSHVPNTFGGGTKVEIKGS

SEQ ID NO: 34055 - protein, 117 aa, synthetic construct
  source 1..117: note = Description of Artificial Sequence: Synthetic polypeptide; note = VH of XENP023804
QIQLVQSGSELKKPGASVKVSCKASGYTFTHYGMNWVRQAPGQGLEWMGWINTYTGEPTYADGFTGRFVFSLDTSVSTAYLQLSSLKAEDTAVYFCARDYYGSSPYWGQGTLVTVSS

SEQ ID NO: 34056 - protein, 114 aa, synthetic construct; identical to SEQ ID NO: 33651
  source 1..114: note = Description of Artificial Sequence: Synthetic polypeptide; note = VL of XENP023804

SEQ ID NO: 34057 - protein, 5 aa, synthetic construct
  source 1..5: note = Description of Artificial Sequence: Synthetic peptide; note = XENP023804 vhCDR1
HYGMN

SEQ ID NO: 34058 - protein, 17 aa, synthetic construct
  source 1..17: note = Description of Artificial Sequence: Synthetic peptide; note = XENP023804 vhCDR2
WINTYTGEPTYADGFTG

SEQ ID NO: 34059 - protein, 8 aa, synthetic construct
  source 1..8: note = Description of Artificial Sequence: Synthetic peptide; note = XENP023804 vhCDR3
DYYGSSPY

SEQ ID NO: 34060 - protein, 16 aa, synthetic construct
  source 1..16: note = Description of Artificial Sequence: Synthetic peptide; note = XENP023804 vlCDR1
KSSQSIVHSNGNTYLE

SEQ ID NO: 34061 - protein, 7 aa, synthetic construct
  source 1..7: note = Description of Artificial Sequence: Synthetic peptide; note = XENP023804 vlCDR2
KVSNRFS

SEQ ID NO: 34062 - protein, 9 aa, synthetic construct
  source 1..9: note = Description of Artificial Sequence: Synthetic peptide; note = XENP023804 vlCDR3
FQGSHVPNT

SEQ ID NO: 34063 - protein, 251 aa, synthetic construct
  source 1..251: note = Description of Artificial Sequence: Synthetic polypeptide; note = XENP023805 1C11_H3.68_L3_scFv
QIQLVQSGSELKKPGASVKVSCKASGYTFTHYGMNWVRQAPGQGLEWMGWINTYTGEPTYADGFTGRFVFSLDTSVSTAYLQMSSLKAEDTAVYFCARDYYGSSPYWGQGTLVTVSSGKPGSGKPGSGKPGSGKPGSDVLMTQSPDSLAVSLGERATINCKSSQSIVHSNGNTYLEWYQQKPGQSPKLLIYKVSNRFSGVPDRFSGSGSGTDFTLTISSLQAEDVAVYYCFQGSHVPNTFGGGTKVEIKGS

SEQ ID NO: 34064 - protein, 117 aa, synthetic construct
  source 1..117: note = Description of Artificial Sequence: Synthetic polypeptide; note = VH of XENP023805
QIQLVQSGSELKKPGASVKVSCKASGYTFTHYGMNWVRQAPGQGLEWMGWINTYTGEPTYADGFTGRFVFSLDTSVSTAYLQMSSLKAEDTAVYFCARDYYGSSPYWGQGTLVTVSS

SEQ ID NO: 34065 - protein, 114 aa, synthetic construct; identical to SEQ ID NO: 33651
  source 1..114: note = Description of Artificial Sequence: Synthetic polypeptide; note = VL of XENP023805

SEQ ID NO: 34066 - protein, 5 aa, synthetic construct
  source 1..5: note = Description of Artificial Sequence: Synthetic peptide; note = XENP023805 vhCDR1
HYGMN

SEQ ID NO: 34067 - protein, 17 aa, synthetic construct
  source 1..17: note = Description of Artificial Sequence: Synthetic peptide; note = XENP023805 vhCDR2
WINTYTGEPTYADGFTG

SEQ ID NO: 34068 - protein, 8 aa, synthetic construct
  source 1..8: note = Description of Artificial Sequence: Synthetic peptide; note = XENP023805 vhCDR3
DYYGSSPY

SEQ ID NO: 34069 - protein, 16 aa, synthetic construct
  source 1..16: note = Description of Artificial Sequence: Synthetic peptide; note = XENP023805 vlCDR1
KSSQSIVHSNGNTYLE

SEQ ID NO: 34070 - protein, 7 aa, synthetic construct
  source 1..7: note = Description of Artificial Sequence: Synthetic peptide; note = XENP023805 vlCDR2
KVSNRFS

SEQ ID NO: 34071 - protein, 9 aa, synthetic construct
  source 1..9: note = Description of Artificial Sequence: Synthetic peptide; note = XENP023805 vlCDR3
FQGSHVPNT

SEQ ID NO: 34072 - protein, 251 aa, synthetic construct
  source 1..251: note = Description of Artificial Sequence: Synthetic polypeptide; note = XENP023806 1C11_H3.69_L3_scFv
QIQLVQSGSELKKPGASVKVSCKASGYTFTHYGMNWVRQAPGQGLEWMGWINTYTGEPTYADGFTGRFVFSLDTSVSTAYLQWSSLKAEDTAVYFCARDYYGSSPYWGQGTLVTVSSGKPGSGKPGSGKPGSGKPGSDVLMTQSPDSLAVSLGERATINCKSSQSIVHSNGNTYLEWYQQKPGQSPKLLIYKVSNRFSGVPDRFSGSGSGTDFTLTISSLQAEDVAVYYCFQGSHVPNTFGGGTKVEIKGS

SEQ ID NO: 34073 - protein, 117 aa, synthetic construct
  source 1..117: note = Description of Artificial Sequence: Synthetic polypeptide; note = VH of XENP023806
QIQLVQSGSELKKPGASVKVSCKASGYTFTHYGMNWVRQAPGQGLEWMGWINTYTGEPTYADGFTGRFVFSLDTSVSTAYLQWSSLKAEDTAVYFCARDYYGSSPYWGQGTLVTVSS

SEQ ID NO: 34074 - protein, 114 aa, synthetic construct; identical to SEQ ID NO: 33651
  source 1..114: note = Description of Artificial Sequence: Synthetic polypeptide; note = VL of XENP023806

SEQ ID NO: 34075 - protein, 5 aa, synthetic construct
  source 1..5: note = Description of Artificial Sequence: Synthetic peptide; note = XENP023806 vhCDR1
HYGMN

SEQ ID NO: 34076 - protein, 17 aa, synthetic construct
  source 1..17: note = Description of Artificial Sequence: Synthetic peptide; note = XENP023806 vhCDR2
WINTYTGEPTYADGFTG

SEQ ID NO: 34077 - protein, 8 aa, synthetic construct
  source 1..8: note = Description of Artificial Sequence: Synthetic peptide; note = XENP023806 vhCDR3
DYYGSSPY

SEQ ID NO: 34078 - protein, 16 aa, synthetic construct
  source 1..16: note = Description of Artificial Sequence: Synthetic peptide; note = XENP023806 vlCDR1
KSSQSIVHSNGNTYLE

SEQ ID NO: 34079 - protein, 7 aa, synthetic construct
  source 1..7: note = Description of Artificial Sequence: Synthetic peptide; note = XENP023806 vlCDR2
KVSNRFS

SEQ ID NO: 34080 - protein, 9 aa, synthetic construct
  source 1..9: note = Description of Artificial Sequence: Synthetic peptide; note = XENP023806 vlCDR3
FQGSHVPNT

SEQ ID NO: 34081 - protein, 251 aa, synthetic construct
  source 1..251: note = Description of Artificial Sequence: Synthetic polypeptide; note = XENP023807 1C11_H3.70_L3_scFv
QIQLVQSGSELKKPGASVKVSCKASGYTFTHYGMNWVRQAPGQGLEWMGWINTYTGEPTYADGFTGRFVFSLDTSVSTAYLQVSSLKAEDTAVYFCARDYYGSSPYWGQGTLVTVSSGKPGSGKPGSGKPGSGKPGSDVLMTQSPDSLAVSLGERATINCKSSQSIVHSNGNTYLEWYQQKPGQSPKLLIYKVSNRFSGVPDRFSGSGSGTDFTLTISSLQAEDVAVYYCFQGSHVPNTFGGGTKVEIKGS

SEQ ID NO: 34082 - protein, 117 aa, synthetic construct
  source 1..117: note = Description of Artificial Sequence: Synthetic polypeptide; note = VH of XENP023807
QIQLVQSGSELKKPGASVKVSCKASGYTFTHYGMNWVRQAPGQGLEWMGWINTYTGEPTYADGFTGRFVFSLDTSVSTAYLQVSSLKAEDTAVYFCARDYYGSSPYWGQGTLVTVSS

SEQ ID NO: 34083 - protein, 114 aa, synthetic construct; identical to SEQ ID NO: 33651
  source 1..114: note = Description of Artificial Sequence: Synthetic polypeptide; note = VL of XENP023807

SEQ ID NO: 34084 - protein, 5 aa, synthetic construct
  source 1..5: note = Description of Artificial Sequence: Synthetic peptide; note = XENP023807 vhCDR1
HYGMN

SEQ ID NO: 34085 - protein, 17 aa, synthetic construct
  source 1..17: note = Description of Artificial Sequence: Synthetic peptide; note = XENP023807 vhCDR2
WINTYTGEPTYADGFTG

SEQ ID NO: 34086 - protein, 8 aa, synthetic construct
  source 1..8: note = Description of Artificial Sequence: Synthetic peptide; note = XENP023807 vhCDR3
DYYGSSPY

SEQ ID NO: 34087 - protein, 16 aa, synthetic construct
  source 1..16: note = Description of Artificial Sequence: Synthetic peptide; note = XENP023807 vlCDR1
KSSQSIVHSNGNTYLE

SEQ ID NO: 34088 - protein, 7 aa, synthetic construct
  source 1..7: note = Description of Artificial Sequence: Synthetic peptide; note = XENP023807 vlCDR2
KVSNRFS

SEQ ID NO: 34089 - protein, 9 aa, synthetic construct
  source 1..9: note = Description of Artificial Sequence: Synthetic peptide; note = XENP023807 vlCDR3
FQGSHVPNT

SEQ ID NO: 34090 - protein, 251 aa, synthetic construct
  source 1..251: note = Description of Artificial Sequence: Synthetic polypeptide; note = XENP023808 1C11_H3.71_L3_scFv
QIQLVQSGSELKKPGASVKVSCKASGYTFTHYGMNWVRQAPGQGLEWMGWINTYTGEPTYADGFTGRFVFSLDTSVSTAYLQISSLRAEDTAVYFCARDYYGSSPYWGQGTLVTVSSGKPGSGKPGSGKPGSGKPGSDVLMTQSPDSLAVSLGERATINCKSSQSIVHSNGNTYLEWYQQKPGQSPKLLIYKVSNRFSGVPDRFSGSGSGTDFTLTISSLQAEDVAVYYCFQGSHVPNTFGGGTKVEIKGS

SEQ ID NO: 34091 - protein, 117 aa, synthetic construct
  source 1..117: note = Description of Artificial Sequence: Synthetic polypeptide; note = VH of XENP023808
QIQLVQSGSELKKPGASVKVSCKASGYTFTHYGMNWVRQAPGQGLEWMGWINTYTGEPTYADGFTGRFVFSLDTSVSTAYLQISSLRAEDTAVYFCARDYYGSSPYWGQGTLVTVSS

SEQ ID NO: 34092 - protein, 114 aa, synthetic construct; identical to SEQ ID NO: 33651
  source 1..114: note = Description of Artificial Sequence: Synthetic polypeptide; note = VL of XENP023808

SEQ ID NO: 34093 - protein, 5 aa, synthetic construct
  source 1..5: note = Description of Artificial Sequence: Synthetic peptide; note = XENP023808 vhCDR1
HYGMN

SEQ ID NO: 34094 - protein, 17 aa, synthetic construct
  source 1..17: note = Description of Artificial Sequence: Synthetic peptide; note = XENP023808 vhCDR2
WINTYTGEPTYADGFTG

SEQ ID NO: 34095 - protein, 8 aa, synthetic construct
  source 1..8: note = Description of Artificial Sequence: Synthetic peptide; note = XENP023808 vhCDR3
DYYGSSPY

SEQ ID NO: 34096 - protein, 16 aa, synthetic construct
  source 1..16: note = Description of Artificial Sequence: Synthetic peptide; note = XENP023808 vlCDR1
KSSQSIVHSNGNTYLE

SEQ ID NO: 34097 - protein, 7 aa, synthetic construct
  source 1..7: note = Description of Artificial Sequence: Synthetic peptide; note = XENP023808 vlCDR2
KVSNRFS

SEQ ID NO: 34098 - protein, 9 aa, synthetic construct
  source 1..9: note = Description of Artificial Sequence: Synthetic peptide; note = XENP023808 vlCDR3
FQGSHVPNT

SEQ ID NO: 34099 - protein, 251 aa, synthetic construct
  source 1..251: note = Description of Artificial Sequence: Synthetic polypeptide; note = XENP023809 1C11_H3.72_L3_scFv
QIQLVQSGSELKKPGASVKVSCKASGYTFTHYGMNWVRQAPGQGLEWMGWINTYTGEPTYADGFTGRFVFSLDTSVSTAYLQISSLTAEDTAVYFCARDYYGSSPYWGQGTLVTVSSGKPGSGKPGSGKPGSGKPGSDVLMTQSPDSLAVSLGERATINCKSSQSIVHSNGNTYLEWYQQKPGQSPKLLIYKVSNRFSGVPDRFSGSGSGTDFTLTISSLQAEDVAVYYCFQGSHVPNTFGGGTKVEIKGS

SEQ ID NO: 34100 - protein, 117 aa, synthetic construct
  source 1..117: note = Description of Artificial Sequence: Synthetic polypeptide; note = VH of XENP023809
QIQLVQSGSELKKPGASVKVSCKASGYTFTHYGMNWVRQAPGQGLEWMGWINTYTGEPTYADGFTGRFVFSLDTSVSTAYLQISSLTAEDTAVYFCARDYYGSSPYWGQGTLVTVSS

SEQ ID NO: 34101 - protein, 114 aa, synthetic construct; identical to SEQ ID NO: 33651
  source 1..114: note = Description of Artificial Sequence: Synthetic polypeptide; note = VL of XENP023809

SEQ ID NO: 34102 - protein, 5 aa, synthetic construct
  source 1..5: note = Description of Artificial Sequence: Synthetic peptide; note = XENP023809 vhCDR1
HYGMN

SEQ ID NO: 34103 - protein, 17 aa, synthetic construct
  source 1..17: note = Description of Artificial Sequence: Synthetic peptide; note = XENP023809 vhCDR2
WINTYTGEPTYADGFTG

SEQ ID NO: 34104 - protein, 8 aa, synthetic construct
  source 1..8: note = Description of Artificial Sequence: Synthetic peptide; note = XENP023809 vhCDR3
DYYGSSPY

SEQ ID NO: 34105 - protein, 16 aa, synthetic construct
  source 1..16: note = Description of Artificial Sequence: Synthetic peptide; note = XENP023809 vlCDR1
KSSQSIVHSNGNTYLE

SEQ ID NO: 34106 - protein, 7 aa, synthetic construct
  source 1..7: note = Description of Artificial Sequence: Synthetic peptide; note = XENP023809 vlCDR2
KVSNRFS

SEQ ID NO: 34107 - protein, 9 aa, synthetic construct
  source 1..9: note = Description of Artificial Sequence: Synthetic peptide; note = XENP023809 vlCDR3
FQGSHVPNT

SEQ ID NO: 34108 - protein, 251 aa, synthetic construct
  source 1..251: note = Description of Artificial Sequence: Synthetic polypeptide; note = XENP023810 1C11_H3.73_L3_scFv
QIQLVQSGSELKKPGASVKVSCKASGYTFTHYGMNWVRQAPGQGLEWMGWINTYTGEPTYADGFTGRFVFSLDTSVSTAYLQISSLRSEDTAVYFCARDYYGSSPYWGQGTLVTVSSGKPGSGKPGSGKPGSGKPGSDVLMTQSPDSLAVSLGERATINCKSSQSIVHSNGNTYLEWYQQKPGQSPKLLIYKVSNRFSGVPDRFSGSGSGTDFTLTISSLQAEDVAVYYCFQGSHVPNTFGGGTKVEIKGS

SEQ ID NO: 34109 - protein, 117 aa, synthetic construct
  source 1..117: note = Description of Artificial Sequence: Synthetic polypeptide; note = VH of XENP023810
QIQLVQSGSELKKPGASVKVSCKASGYTFTHYGMNWVRQAPGQGLEWMGWINTYTGEPTYADGFTGRFVFSLDTSVSTAYLQISSLRSEDTAVYFCARDYYGSSPYWGQGTLVTVSS

SEQ ID NO: 34110 - protein, 114 aa, synthetic construct; identical to SEQ ID NO: 33651
  source 1..114: note = Description of Artificial Sequence: Synthetic polypeptide; note = VL of XENP023810

SEQ ID NO: 34111 - protein, 5 aa, synthetic construct
  source 1..5: note = Description of Artificial Sequence: Synthetic peptide; note = XENP023810 vhCDR1
HYGMN

SEQ ID NO: 34112 - protein, 17 aa, synthetic construct
  source 1..17: note = Description of Artificial Sequence: Synthetic peptide; note = XENP023810 vhCDR2
WINTYTGEPTYADGFTG

SEQ ID NO: 34113 - protein, 8 aa, synthetic construct
  source 1..8: note = Description of Artificial Sequence: Synthetic peptide; note = XENP023810 vhCDR3
DYYGSSPY

SEQ ID NO: 34114 - protein, 16 aa, synthetic construct
  source 1..16: note = Description of Artificial Sequence: Synthetic peptide; note = XENP023810 vlCDR1
KSSQSIVHSNGNTYLE

SEQ ID NO: 34115 - protein, 7 aa, synthetic construct
  source 1..7: note = Description of Artificial Sequence: Synthetic peptide; note = XENP023810 vlCDR2
KVSNRFS

SEQ ID NO: 34116 - protein, 9 aa, synthetic construct
  source 1..9: note = Description of Artificial Sequence: Synthetic peptide; note = XENP023810 vlCDR3
FQGSHVPNT

SEQ ID NO: 34117 - protein, 251 aa, synthetic construct
  source 1..251: note = Description of Artificial Sequence: Synthetic polypeptide; note = XENP023811 1C11_H3.74_L3_scFv
QIQLVQSGSELKKPGASVKVSCKASGYTFTHYGMNWVRQAPGQGLEWMGWINTYTGEPTYADGFTGRFVFSLDTSVSTAYLQISSLKAEDTAVYYCARDYYGSSPYWGQGTLVTVSSGKPGSGKPGSGKPGSGKPGSDVLMTQSPDSLAVSLGERATINCKSSQSIVHSNGNTYLEWYQQKPGQSPKLLIYKVSNRFSGVPDRFSGSGSGTDFTLTISSLQAEDVAVYYCFQGSHVPNTFGGGTKVEIKGS

SEQ ID NO: 34118 - protein, 117 aa, synthetic construct
  source 1..117: note = Description of Artificial Sequence: Synthetic polypeptide; note = VH of XENP023811
QIQLVQSGSELKKPGASVKVSCKASGYTFTHYGMNWVRQAPGQGLEWMGWINTYTGEPTYADGFTGRFVFSLDTSVSTAYLQISSLKAEDTAVYYCARDYYGSSPYWGQGTLVTVSS

SEQ ID NO: 34119 - protein, 114 aa, synthetic construct; identical to SEQ ID NO: 33651
  source 1..114: note = Description of Artificial Sequence: Synthetic polypeptide; note = VL of XENP023811

SEQ ID NO: 34120 - protein, 5 aa, synthetic construct
  source 1..5: note = Description of Artificial Sequence: Synthetic peptide; note = XENP023811 vhCDR1
HYGMN

SEQ ID NO: 34121 - protein, 17 aa, synthetic construct
  source 1..17: note = Description of Artificial Sequence: Synthetic peptide; note = XENP023811 vhCDR2
WINTYTGEPTYADGFTG

SEQ ID NO: 34122 - protein, 8 aa, synthetic construct
  source 1..8: note = Description of Artificial Sequence: Synthetic peptide; note = XENP023811 vhCDR3
DYYGSSPY

SEQ ID NO: 34123 - protein, 16 aa, synthetic construct
  source 1..16: note = Description of Artificial Sequence: Synthetic peptide; note = XENP023811 vlCDR1
KSSQSIVHSNGNTYLE

SEQ ID NO: 34124 - protein, 7 aa, synthetic construct
  source 1..7: note = Description of Artificial Sequence: Synthetic peptide; note = XENP023811 vlCDR2
KVSNRFS

SEQ ID NO: 34125 - protein, 9 aa, synthetic construct
  source 1..9: note = Description of Artificial Sequence: Synthetic peptide; note = XENP023811 vlCDR3
FQGSHVPNT

SEQ ID NO: 34126 - protein, 251 aa, synthetic construct
  source 1..251: note = Description of Artificial Sequence: Synthetic polypeptide; note = XENP023812 1C11_H3.75_L3_scFv
QIQLVQSGSELKKPGASVKVSCKASGYTFTHYGMNWVRQAPGQGLEWMGWINTYTGEPTYADGFTGRFVFSLDTSVSTAYLQISSLKAEDTAVYFCTRDYYGSSPYWGQGTLVTVSSGKPGSGKPGSGKPGSGKPGSDVLMTQSPDSLAVSLGERATINCKSSQSIVHSNGNTYLEWYQQKPGQSPKLLIYKVSNRFSGVPDRFSGSGSGTDFTLTISSLQAEDVAVYYCFQGSHVPNTFGGGTKVEIKGS

SEQ ID NO: 34127 - protein, 117 aa, synthetic construct
  source 1..117: note = Description of Artificial Sequence: Synthetic polypeptide; note = VH of XENP023812
QIQLVQSGSELKKPGASVKVSCKASGYTFTHYGMNWVRQAPGQGLEWMGWINTYTGEPTYADGFTGRFVFSLDTSVSTAYLQISSLKAEDTAVYFCTRDYYGSSPYWGQGTLVTVSS

SEQ ID NO: 34128 - protein, 114 aa, synthetic construct; identical to SEQ ID NO: 33651
  source 1..114: note = Description of Artificial Sequence: Synthetic polypeptide; note = VL of XENP023812

SEQ ID NO: 34129 - protein, 5 aa, synthetic construct
  source 1..5: note = Description of Artificial Sequence: Synthetic peptide; note = XENP023812 vhCDR1
HYGMN

SEQ ID NO: 34130 - protein, 17 aa, synthetic construct
  source 1..17: note = Description of Artificial Sequence: Synthetic peptide; note = XENP023812 vhCDR2
WINTYTGEPTYADGFTG

SEQ ID NO: 34131 - protein, 8 aa, synthetic construct
  source 1..8: note = Description of Artificial Sequence: Synthetic peptide; note = XENP023812 vhCDR3
DYYGSSPY

SEQ ID NO: 34132 - protein, 16 aa, synthetic construct
  source 1..16: note = Description of Artificial Sequence: Synthetic peptide; note = XENP023812 vlCDR1
KSSQSIVHSNGNTYLE

SEQ ID NO: 34133 - protein, 7 aa, synthetic construct
  source 1..7: note = Description of Artificial Sequence: Synthetic peptide; note = XENP023812 vlCDR2
KVSNRFS

SEQ ID NO: 34134 - protein, 9 aa, synthetic construct
  source 1..9: note = Description of Artificial Sequence: Synthetic peptide; note = XENP023812 vlCDR3
FQGSHVPNT

SEQ ID NO: 34135 - protein, 251 aa, synthetic construct
  source 1..251: note = Description of Artificial Sequence: Synthetic polypeptide; note = XENP024191 1C11_H3_L3.84_scFv
QIQLVQSGSELKKPGASVKVSCKASGYTFTHYGMNWVRQAPGQGLEWMGWINTYTGEPTYADGFTGRFVFSLDTSVSTAYLQISSLKAEDTAVYFCARDYYGSSPYWGQGTLVTVSSGKPGSGKPGSGKPGSGKPGSDVVMTQSPDSLAVSLGERATINCKASQSIVHSNGNTYLEWYQQKPGQPPKLLIYKVSNRFSGVPDRFSGSGSGTDFTLTISSLQAEDVAVYYCFQGSHVPNTFGGGTKVEIKGS

SEQ ID NO: 34136 - protein, 117 aa, synthetic construct; identical to SEQ ID NO: 33034
  source 1..117: note = Description of Artificial Sequence: Synthetic polypeptide; note = VH of XENP024191

SEQ ID NO: 34137 - protein, 114 aa, synthetic construct
  source 1..114: note = Description of Artificial Sequence: Synthetic polypeptide; note = VL of XENP024191
DVVMTQSPDSLAVSLGERATINCKASQSIVHSNGNTYLEWYQQKPGQPPKLLIYKVSNRFSGVPDRFSGSGSGTDFTLTISSLQAEDVAVYYCFQGSHVPNTFGGGTKVEIKGS

SEQ ID NO: 34138 - protein, 5 aa, synthetic construct
  source 1..5: note = Description of Artificial Sequence: Synthetic peptide; note = XENP024191 vhCDR1
HYGMN

SEQ ID NO: 34139 - protein, 17 aa, synthetic construct
  source 1..17: note = Description of Artificial Sequence: Synthetic peptide; note = XENP024191 vhCDR2
WINTYTGEPTYADGFTG

SEQ ID NO: 34140 - protein, 8 aa, synthetic construct
  source 1..8: note = Description of Artificial Sequence: Synthetic peptide; note = XENP024191 vhCDR3
DYYGSSPY

SEQ ID NO: 34141 - protein, 16 aa, synthetic construct
  source 1..16: note = Description of Artificial Sequence: Synthetic peptide; note = XENP024191 vlCDR1
KASQSIVHSNGNTYLE

SEQ ID NO: 34142 - protein, 7 aa, synthetic construct
  source 1..7: note = Description of Artificial Sequence: Synthetic peptide; note = XENP024191 vlCDR2
KVSNRFS

SEQ ID NO: 34143 - protein, 9 aa, synthetic construct
  source 1..9: note = Description of Artificial Sequence: Synthetic peptide; note = XENP024191 vlCDR3
FQGSHVPNT

SEQ ID NO: 34144 - protein, 251 aa, synthetic construct
  source 1..251: note = Description of Artificial Sequence: Synthetic polypeptide; note = XENP024192 1C11_H3_L3.102_scFv
QIQLVQSGSELKKPGASVKVSCKASGYTFTHYGMNWVRQAPGQGLEWMGWINTYTGEPTYADGFTGRFVFSLDTSVSTAYLQISSLKAEDTAVYFCARDYYGSSPYWGQGTLVTVSSGKPGSGKPGSGKPGSGKPGSDVLMTQSPDSLAVSVGERATINCKSSQSIVHSNGNTYLEWYQQKPGQSPKLLIYKVSNRFSGVPDRFSGSGSGTDFTLTISSLQAEDVAVYYCFQGSHVPNTFGGGTKVEIKGS

SEQ ID NO: 34145 - protein, 117 aa, synthetic construct; identical to SEQ ID NO: 33034
  source 1..117: note = Description of Artificial Sequence: Synthetic polypeptide; note = VH of XENP024192

SEQ ID NO: 34146 - protein, 114 aa, synthetic construct
  source 1..114: note = Description of Artificial Sequence: Synthetic polypeptide; note = VL of XENP024192
DVLMTQSPDSLAVSVGERATINCKSSQSIVHSNGNTYLEWYQQKPGQSPKLLIYKVSNRFSGVPDRFSGSGSGTDFTLTISSLQAEDVAVYYCFQGSHVPNTFGGGTKVEIKGS

SEQ ID NO: 34147 - protein, 5 aa, synthetic construct
  source 1..5: note = Description of Artificial Sequence: Synthetic peptide; note = XENP024192 vhCDR1
HYGMN

SEQ ID NO: 34148 - protein, 17 aa, synthetic construct
  source 1..17: note = Description of Artificial Sequence: Synthetic peptide; note = XENP024192 vhCDR2
WINTYTGEPTYADGFTG

SEQ ID NO: 34149 - protein, 8 aa, synthetic construct
  source 1..8: note = Description of Artificial Sequence: Synthetic peptide; note = XENP024192 vhCDR3
DYYGSSPY

SEQ ID NO: 34150 - protein, 16 aa, synthetic construct
  source 1..16: note = Description of Artificial Sequence: Synthetic peptide; note = XENP024192 vlCDR1
KSSQSIVHSNGNTYLE

SEQ ID NO: 34151 - protein, 7 aa, synthetic construct
  source 1..7: note = Description of Artificial Sequence: Synthetic peptide; note = XENP024192 vlCDR2
KVSNRFS

SEQ ID NO: 34152 - protein, 9 aa, synthetic construct
  source 1..9: note = Description of Artificial Sequence: Synthetic peptide; note = XENP024192 vlCDR3
FQGSHVPNT

SEQ ID NO: 34153 - protein, 251 aa, synthetic construct
  source 1..251: note = Description of Artificial Sequence: Synthetic polypeptide; note = XENP024193 1C11_H3_L3.103_scFv
QIQLVQSGSELKKPGASVKVSCKASGYTFTHYGMNWVRQAPGQGLEWMGWINTYTGEPTYADGFTGRFVFSLDTSVSTAYLQISSLKAEDTAVYFCARDYYGSSPYWGQGTLVTVSSGKPGSGKPGSGKPGSGKPGSDVLMTQSPDSLAVSPGERATINCKSSQSIVHSNGNTYLEWYQQKPGQSPKLLIYKVSNRFSGVPDRFSGSGSGTDFTLTISSLQAEDVAVYYCFQGSHVPNTFGGGTKVEIKGS

SEQ ID NO: 34154 - protein, 117 aa, synthetic construct; identical to SEQ ID NO: 33034
  source 1..117: note = Description of Artificial Sequence: Synthetic polypeptide; note = VH of XENP024193

SEQ ID NO: 34155 - protein, 114 aa, synthetic construct
  source 1..114: note = Description of Artificial Sequence: Synthetic polypeptide; note = VL of XENP024193
DVLMTQSPDSLAVSPGERATINCKSSQSIVHSNGNTYLEWYQQKPGQSPKLLIYKVSNRFSGVPDRFSGSGSGTDFTLTISSLQAEDVAVYYCFQGSHVPNTFGGGTKVEIKGS

SEQ ID NO: 34156 - protein, 5 aa, synthetic construct
  source 1..5: note = Description of Artificial Sequence: Synthetic peptide; note = XENP024193 vhCDR1
HYGMN

SEQ ID NO: 34157 - protein, 17 aa, synthetic construct
  source 1..17: note = Description of Artificial Sequence: Synthetic peptide; note = XENP024193 vhCDR2
WINTYTGEPTYADGFTG

SEQ ID NO: 34158 - protein, 8 aa, synthetic construct
  source 1..8: note = Description of Artificial Sequence: Synthetic peptide; note = XENP024193 vhCDR3
DYYGSSPY

SEQ ID NO: 34159 - protein, 16 aa, synthetic construct
  source 1..16: note = Description of Artificial Sequence: Synthetic peptide; note = XENP024193 vlCDR1
KSSQSIVHSNGNTYLE

SEQ ID NO: 34160 - protein, 7 aa, synthetic construct
  source 1..7: note = Description of Artificial Sequence: Synthetic peptide; note = XENP024193 vlCDR2
KVSNRFS

SEQ ID NO: 34161 - protein, 9 aa, synthetic construct
  source 1..9: note = Description of Artificial Sequence: Synthetic peptide; note = XENP024193 vlCDR3
FQGSHVPNT

SEQ ID NO: 34162 - protein, 251 aa, synthetic construct; identical to SEQ ID NO: 33235
  source 1..251: note = Description of Artificial Sequence: Synthetic polypeptide; note = XENP024194 1C11_H3_L3.104_scFv

SEQ ID NO: 34163 - protein, 117 aa, synthetic construct; identical to SEQ ID NO: 33034
  source 1..117: note = Description of Artificial Sequence: Synthetic polypeptide; note = VH of XENP024194

SEQ ID NO: 34164 - protein, 114 aa, synthetic construct; identical to SEQ ID NO: 33237
  source 1..114: note = Description of Artificial Sequence: Synthetic polypeptide; note = VL of XENP024194

SEQ ID NO: 34165 - protein, 5 aa, synthetic construct
  source 1..5: note = Description of Artificial Sequence: Synthetic peptide; note = XENP024194 vhCDR1
HYGMN

SEQ ID NO: 34166 - protein, 17 aa, synthetic construct
  source 1..17: note = Description of Artificial Sequence: Synthetic peptide; note = XENP024194 vhCDR2
WINTYTGEPTYADGFTG

SEQ ID NO: 34167 - protein, 8 aa, synthetic construct
  source 1..8: note = Description of Artificial Sequence: Synthetic peptide; note = XENP024194 vhCDR3
DYYGSSPY

SEQ ID NO: 34168 - protein, 16 aa, synthetic construct
  source 1..16: note = Description of Artificial Sequence: Synthetic peptide; note = XENP024194 vlCDR1
KSSQSIVHSNGNTYLE

SEQ ID NO: 34169 - protein, 7 aa, synthetic construct
  source 1..7: note = Description of Artificial Sequence: Synthetic peptide; note = XENP024194 vlCDR2
KVSNRFS

SEQ ID NO: 34170 - protein, 9 aa, synthetic construct
  source 1..9: note = Description of Artificial Sequence: Synthetic peptide; note = XENP024194 vlCDR3
FQGSHVPNT

SEQ ID NO: 34171 - protein, 251 aa, synthetic construct
  source 1..251: note = Description of Artificial Sequence: Synthetic polypeptide; note = XENP024195 1C11_H3_L3.111_scFv
QIQLVQSGSELKKPGASVKVSCKASGYTFTHYGMNWVRQAPGQGLEWMGWINTYTGEPTYADGFTGRFVFSLDTSVSTAYLQISSLKAEDTAVYFCARDYYGSSPYWGQGTLVTVSSGKPGSGKPGSGKPGSGKPGSDVLMTQSPDSLAVSLGERATINCKSSQGIVHSNGNTYLEWYQQKPGQSPKLLIYKVSNRFSGVPDRFSGSGSGTDFTLTISSLQAEDVAVYYCFQGSHVPNTFGGGTKVEIKGS

SEQ ID NO: 34172 - protein, 117 aa, synthetic construct; identical to SEQ ID NO: 33034
  source 1..117: note = Description of Artificial Sequence: Synthetic polypeptide; note = VH of XENP024195

SEQ ID NO: 34173 - protein, 114 aa, synthetic construct
  source 1..114: note = Description of Artificial Sequence: Synthetic polypeptide; note = VL of XENP024195
DVLMTQSPDSLAVSLGERATINCKSSQGIVHSNGNTYLEWYQQKPGQSPKLLIYKVSNRFSGVPDRFSGSGSGTDFTLTISSLQAEDVAVYYCFQGSHVPNTFGGGTKVEIKGS

SEQ ID NO: 34174 - protein, 5 aa, synthetic construct
  source 1..5: note = Description of Artificial Sequence: Synthetic peptide; note = XENP024195 vhCDR1
HYGMN

SEQ ID NO: 34175 - protein, 17 aa, synthetic construct
  source 1..17: note = Description of Artificial Sequence: Synthetic peptide; note = XENP024195 vhCDR2
WINTYTGEPTYADGFTG

SEQ ID NO: 34176 - protein, 8 aa, synthetic construct
  source 1..8: note = Description of Artificial Sequence: Synthetic peptide; note = XENP024195 vhCDR3
DYYGSSPY

SEQ ID NO: 34177 - protein, 16 aa, synthetic construct
  source 1..16: note = Description of Artificial Sequence: Synthetic peptide; note = XENP024195 vlCDR1
KSSQGIVHSNGNTYLE

SEQ ID NO: 34178 - protein, 7 aa, synthetic construct
  source 1..7: note = Description of Artificial Sequence: Synthetic peptide; note = XENP024195 vlCDR2
KVSNRFS

SEQ ID NO: 34179 - protein, 9 aa, synthetic construct
  source 1..9: note = Description of Artificial Sequence: Synthetic peptide; note = XENP024195 vlCDR3
FQGSHVPNT

SEQ ID NO: 34180 - protein, 251 aa, synthetic construct
  source 1..251: note = Description of Artificial Sequence: Synthetic polypeptide; note = XENP024196 1C11_H3_L3.112_scFv
QIQLVQSGSELKKPGASVKVSCKASGYTFTHYGMNWVRQAPGQGLEWMGWINTYTGEPTYADGFTGRFVFSLDTSVSTAYLQISSLKAEDTAVYFCARDYYGSSPYWGQGTLVTVSSGKPGSGKPGSGKPGSGKPGSDVLMTQSPDSLAVSLGERATINCKSSQSVLHSNGNTYLEWYQQKPGQSPKLLIYKVSNRFSGVPDRFSGSGSGTDFTLTISSLQAEDVAVYYCFQGSHVPNTFGGGTKVEIKGS

SEQ ID NO: 34181 - protein, 117 aa, synthetic construct; identical to SEQ ID NO: 33034
  source 1..117: note = Description of Artificial Sequence: Synthetic polypeptide; note = VH of XENP024196

SEQ ID NO: 34182 - protein, 114 aa, synthetic construct
  source 1..114: note = Description of Artificial Sequence: Synthetic polypeptide; note = VL of XENP024196
DVLMTQSPDSLAVSLGERATINCKSSQSVLHSNGNTYLEWYQQKPGQSPKLLIYKVSNRFSGVPDRFSGSGSGTDFTLTISSLQAEDVAVYYCFQGSHVPNTFGGGTKVEIKGS

SEQ ID NO: 34183 - protein, 5 aa, synthetic construct
  source 1..5: note = Description of Artificial Sequence: Synthetic peptide; note = XENP024196 vhCDR1
HYGMN

SEQ ID NO: 34184 - protein, 17 aa, synthetic construct
  source 1..17: note = Description of Artificial Sequence: Synthetic peptide; note = XENP024196 vhCDR2
WINTYTGEPTYADGFTG

SEQ ID NO: 34185 - protein, 8 aa, synthetic construct
  source 1..8: note = Description of Artificial Sequence: Synthetic peptide; note = XENP024196 vhCDR3
DYYGSSPY

SEQ ID NO: 34186 - protein, 16 aa, synthetic construct
  source 1..16: note = Description of Artificial Sequence: Synthetic peptide; note = XENP024196 vlCDR1
KSSQSVLHSNGNTYLE

SEQ ID NO: 34187 - protein, 7 aa, synthetic construct
  source 1..7: note = Description of Artificial Sequence: Synthetic peptide; note = XENP024196 vlCDR2
KVSNRFS

SEQ ID NO: 34188 - protein, 9 aa, synthetic construct
  source 1..9: note = Description of Artificial Sequence: Synthetic peptide; note = XENP024196 vlCDR3
FQGSHVPNT

SEQ ID NO: 34189 - protein, 251 aa, synthetic construct
  source 1..251: note = Description of Artificial Sequence: Synthetic polypeptide; note = XENP024201 1C11_H3_L3.113_scFv
QIQLVQSGSELKKPGASVKVSCKASGYTFTHYGMNWVRQAPGQGLEWMGWINTYTGEPTYADGFTGRFVFSLDTSVSTAYLQISSLKAEDTAVYFCARDYYGSSPYWGQGTLVTVSSGKPGSGKPGSGKPGSGKPGSDVLMTQSPDSLAVSLGERATINCKSSQSIVHSNGNTYLEWYQQKPGKSPKLLIYKVSNRFSGVPDRFSGSGSGTDFTLTISSLQAEDVAVYYCFQGSHVPNTFGGGTKVEIKGS

SEQ ID NO: 34190 - protein, 117 aa, synthetic construct; identical to SEQ ID NO: 33034
  source 1..117: note = Description of Artificial Sequence: Synthetic polypeptide; note = VH of XENP024201

SEQ ID NO: 34191 - protein, 114 aa, synthetic construct
  source 1..114: note = Description of Artificial Sequence: Synthetic polypeptide; note = VL of XENP024201
DVLMTQSPDSLAVSLGERATINCKSSQSIVHSNGNTYLEWYQQKPGKSPKLLIYKVSNRFSGVPDRFSGSGSGTDFTLTISSLQAEDVAVYYCFQGSHVPNTFGGGTKVEIKGS

SEQ ID NO: 34192 - protein, 5 aa, synthetic construct
  source 1..5: note = Description of Artificial Sequence: Synthetic peptide; note = XENP024201 vhCDR1
HYGMN

SEQ ID NO: 34193 - protein, 17 aa, synthetic construct
  source 1..17: note = Description of Artificial Sequence: Synthetic peptide; note = XENP024201 vhCDR2
WINTYTGEPTYADGFTG

SEQ ID NO: 34194 - protein, 8 aa, synthetic construct
  source 1..8: note = Description of Artificial Sequence: Synthetic peptide; note = XENP024201 vhCDR3
DYYGSSPY

SEQ ID NO: 34195 - protein, 16 aa, synthetic construct
  source 1..16: note = Description of Artificial Sequence: Synthetic peptide; note = XENP024201 vlCDR1
KSSQSIVHSNGNTYLE

SEQ ID NO: 34196 - protein, 7 aa, synthetic construct
  source 1..7: note = Description of Artificial Sequence: Synthetic peptide; note = XENP024201 vlCDR2
KVSNRFS

SEQ ID NO: 34197 - protein, 9 aa, synthetic construct
  source 1..9: note = Description of Artificial Sequence: Synthetic peptide; note = XENP024201 vlCDR3
FQGSHVPNT

SEQ ID NO: 34198 - protein, 251 aa, synthetic construct
  source 1..251: note = Description of Artificial Sequence: Synthetic polypeptide; note = XENP024202 1C11_H3_L3.115_scFv
QIQLVQSGSELKKPGASVKVSCKASGYTFTHYGMNWVRQAPGQGLEWMGWINTYTGEPTYADGFTGRFVFSLDTSVSTAYLQISSLKAEDTAVYFCARDYYGSSPYWGQGTLVTVSSGKPGSGKPGSGKPGSGKPGSDVLMTQSPDSLAVSLGERATINCKSSQSIVHSNGNTYLEWYQQKPGKVPKLLIYKVSNRFSGVPDRFSGSGSGTDFTLTISSLQAEDVAVYYCFQGSHVPNTFGGGTKVEIKGS

SEQ ID NO: 34199 - protein, 117 aa, synthetic construct; identical to SEQ ID NO: 33034
  source 1..117: note = Description of Artificial Sequence: Synthetic polypeptide; note = VH of XENP024202

SEQ ID NO: 34200 - protein, 114 aa, synthetic construct
  source 1..114: note = Description of Artificial Sequence: Synthetic polypeptide; note = VL of XENP024202
DVLMTQSPDSLAVSLGERATINCKSSQSIVHSNGNTYLEWYQQKPGKVPKLLIYKVSNRFSGVPDRFSGSGSGTDFTLTISSLQAEDVAVYYCFQGSHVPNTFGGGTKVEIKGS

SEQ ID NO: 34201 - protein, 5 aa, synthetic construct
  source 1..5: note = Description of Artificial Sequence: Synthetic peptide; note = XENP024202 vhCDR1
HYGMN

SEQ ID NO: 34202 - protein, 17 aa, synthetic construct
  source 1..17: note = Description of Artificial Sequence: Synthetic peptide; note = XENP024202 vhCDR2
WINTYTGEPTYADGFTG

SEQ ID NO: 34203 - protein, 8 aa, synthetic construct
  source 1..8: note = Description of Artificial Sequence: Synthetic peptide; note = XENP024202 vhCDR3
DYYGSSPY

SEQ ID NO: 34204 - protein, 16 aa, synthetic construct
  source 1..16: note = Description of Artificial Sequence: Synthetic peptide; note = XENP024202 vlCDR1
KSSQSIVHSNGNTYLE

SEQ ID NO: 34205 - protein, 7 aa, synthetic construct
  source 1..7: note = Description of Artificial Sequence: Synthetic peptide; note = XENP024202 vlCDR2
KVSNRFS

SEQ ID NO: 34206 - protein, 9 aa, synthetic construct
  source 1..9: note = Description of Artificial Sequence: Synthetic peptide; note = XENP024202 vlCDR3
FQGSHVPNT

SEQ ID NO: 34207 - protein, 251 aa, synthetic construct
  source 1..251: note = Description of Artificial Sequence: Synthetic polypeptide; note = XENP024203 1C11_H3_L3.118_scFv
QIQLVQSGSELKKPGASVKVSCKASGYTFTHYGMNWVRQAPGQGLEWMGWINTYTGEPTYADGFTGRFVFSLDTSVSTAYLQISSLKAEDTAVYFCARDYYGSSPYWGQGTLVTVSSGKPGSGKPGSGKPGSGKPGSDVLMTQSPDSLAVSLGERATINCKSSQSIVHSNGNTYLEWYQQKPGQSPKLLIYKVSSRFSGVPDRFSGSGSGTDFTLTISSLQAEDVAVYYCFQGSHVPNTFGGGTKVEIKGS

SEQ ID NO: 34208 - protein, 117 aa, synthetic construct; identical to SEQ ID NO: 33034
  source 1..117: note = Description of Artificial Sequence: Synthetic polypeptide; note = VH of XENP024203

SEQ ID NO: 34209 - protein, 114 aa, synthetic construct
  source 1..114: note = Description of Artificial Sequence: Synthetic polypeptide; note = VL of XENP024203
DVLMTQSPDSLAVSLGERATINCKSSQSIVHSNGNTYLEWYQQKPGQSPKLLIYKVSSRFSGVPDRFSGSGSGTDFTLTISSLQAEDVAVYYCFQGSHVPNTFGGGTKVEIKGS

SEQ ID NO: 34210 - protein, 5 aa, synthetic construct
  source 1..5: note = Description of Artificial Sequence: Synthetic peptide; note = XENP024203 vhCDR1
HYGMN

SEQ ID NO: 34211 - protein, 17 aa, synthetic construct
  source 1..17: note = Description of Artificial Sequence: Synthetic peptide; note = XENP024203 vhCDR2
WINTYTGEPTYADGFTG

SEQ ID NO: 34212 - protein, 8 aa, synthetic construct
  source 1..8: note = Description of Artificial Sequence: Synthetic peptide; note = XENP024203 vhCDR3
DYYGSSPY

SEQ ID NO: 34213 - protein, 16 aa, synthetic construct
  source 1..16: note = Description of Artificial Sequence: Synthetic peptide; note = XENP024203 vlCDR1
KSSQSIVHSNGNTYLE

SEQ ID NO: 34214 - protein, 7 aa, synthetic construct
  source 1..7: note = Description of Artificial Sequence: Synthetic peptide; note = XENP024203 vlCDR2
KVSSRFS

SEQ ID NO: 34215 - protein, 9 aa, synthetic construct
  source 1..9: note = Description of Artificial Sequence: Synthetic peptide; note = XENP024203 vlCDR3
FQGSHVPNT

SEQ ID NO: 34216 - protein, 251 aa, synthetic construct
  source 1..251: note = Description of Artificial Sequence: Synthetic polypeptide; note = XENP024204 1C11_H3_L3.119_scFv
QIQLVQSGSELKKPGASVKVSCKASGYTFTHYGMNWVRQAPGQGLEWMGWINTYTGEPTYADGFTGRFVFSLDTSVSTAYLQISSLKAEDTAVYFCARDYYGSSPYWGQGTLVTVSSGKPGSGKPGSGKPGSGKPGSDVLMTQSPDSLAVSLGERATINCKSSQSIVHSNGNTYLEWYQQKPGQSPKLLIYKVSNLFSGVPDRFSGSGSGTDFTLTISSLQAEDVAVYYCFQGSHVPNTFGGGTKVEIKGS

SEQ ID NO: 34217 - protein, 117 aa, synthetic construct; identical to SEQ ID NO: 33034
  source 1..117: note = Description of Artificial Sequence: Synthetic polypeptide; note = VH of XENP024204

SEQ ID NO: 34218 - protein, 114 aa, synthetic construct
  source 1..114: note = Description of Artificial Sequence: Synthetic polypeptide; note = VL of XENP024204
DVLMTQSPDSLAVSLGERATINCKSSQSIVHSNGNTYLEWYQQKPGQSPKLLIYKVSNLFSGVPDRFSGSGSGTDFTLTISSLQAEDVAVYYCFQGSHVPNTFGGGTKVEIKGS

SEQ ID NO: 34219 - protein, 5 aa, synthetic construct
  source 1..5: note = Description of Artificial Sequence: Synthetic peptide; note = XENP024204 vhCDR1
HYGMN

SEQ ID NO: 34220 - protein, 17 aa, synthetic construct
  source 1..17: note = Description of Artificial Sequence: Synthetic peptide; note = XENP024204 vhCDR2
WINTYTGEPTYADGFTG

SEQ ID NO: 34221 - protein, 8 aa, synthetic construct
  source 1..8: note = Description of Artificial Sequence: Synthetic peptide; note = XENP024204 vhCDR3
DYYGSSPY

SEQ ID NO: 34222 - protein, 16 aa, synthetic construct
  source 1..16: note = Description of Artificial Sequence: Synthetic peptide; note = XENP024204 vlCDR1
KSSQSIVHSNGNTYLE

SEQ ID NO: 34223 - protein, 7 aa, synthetic construct
  source 1..7: note = Description of Artificial Sequence: Synthetic peptide; note = XENP024204 vlCDR2
KVSNLFS

SEQ ID NO: 34224 - protein, 9 aa, synthetic construct
  source 1..9: note = Description of Artificial Sequence: Synthetic peptide; note = XENP024204 vlCDR3
FQGSHVPNT

SEQ ID NO: 34225 - protein, 251 aa, synthetic construct
  source 1..251: note = Description of Artificial Sequence: Synthetic polypeptide; note = XENP024205 1C11_H3_L3.120_scFv
QIQLVQSGSELKKPGASVKVSCKASGYTFTHYGMNWVRQAPGQGLEWMGWINTYTGEPTYADGFTGRFVFSLDTSVSTAYLQISSLKAEDTAVYFCARDYYGSSPYWGQGTLVTVSSGKPGSGKPGSGKPGSGKPGSDVLMTQSPDSLAVSLGERATINCKSSQSIVHSNGNTYLEWYQQKPGQSPKLLIYKVSNRESGVPDRFSGSGSGTDFTLTISSLQAEDVAVYYCFQGSHVPNTFGGGTKVEIKGS

SEQ ID NO: 34226 - protein, 117 aa, synthetic construct; identical to SEQ ID NO: 33034
  source 1..117: note = Description of Artificial Sequence: Synthetic polypeptide; note = VH of XENP024205

SEQ ID NO: 34227 - protein, 114 aa, synthetic construct
  source 1..114: note = Description of Artificial Sequence: Synthetic polypeptide; note = VL of XENP024205
DVLMTQSPDSLAVSLGERATINCKSSQSIVHSNGNTYLEWYQQKPGQSPKLLIYKVSNRESGVPDRFSGSGSGTDFTLTISSLQAEDVAVYYCFQGSHVPNTFGGGTKVEIKGS

SEQ ID NO: 34228 - protein, 5 aa, synthetic construct
  source 1..5: note = Description of Artificial Sequence: Synthetic peptide; note = XENP024205 vhCDR1
HYGMN

SEQ ID NO: 34229 - protein, 17 aa, synthetic construct
  source 1..17: note = Description of Artificial Sequence: Synthetic peptide; note = XENP024205 vhCDR2
WINTYTGEPTYADGFTG

SEQ ID NO: 34230 - protein, 8 aa, synthetic construct
  source 1..8: note = Description of Artificial Sequence: Synthetic peptide; note = XENP024205 vhCDR3
DYYGSSPY

SEQ ID NO: 34231 - protein, 16 aa, synthetic construct
  source 1..16: note = Description of Artificial Sequence: Synthetic peptide; note = XENP024205 vlCDR1
KSSQSIVHSNGNTYLE

SEQ ID NO: 34232 - protein, 7 aa, synthetic construct
  source 1..7: note = Description of Artificial Sequence: Synthetic peptide; note = XENP024205 vlCDR2
KVSNRES

SEQ ID NO: 34233 - protein, 9 aa, synthetic construct
  source 1..9: note = Description of Artificial Sequence: Synthetic peptide; note = XENP024205 vlCDR3
FQGSHVPNT

SEQ ID NO: 34234 - protein, 251 aa, synthetic construct
  source 1..251: note = Description of Artificial Sequence: Synthetic polypeptide; note = XENP024206 1C11_H3_L3.121_scFv
QIQLVQSGSELKKPGASVKVSCKASGYTFTHYGMNWVRQAPGQGLEWMGWINTYTGEPTYADGFTGRFVFSLDTSVSTAYLQISSLKAEDTAVYFCARDYYGSSPYWGQGTLVTVSSGKPGSGKPGSGKPGSGKPGSDVLMTQSPDSLAVSLGERATINCKSSQSIVHSNGNTYLEWYQQKPGQSPKLLIYKVSNRQSGVPDRFSGSGSGTDFTLTISSLQAEDVAVYYCFQGSHVPNTFGGGTKVEIKGS

SEQ ID NO: 34235 - protein, 117 aa, synthetic construct; identical to SEQ ID NO: 33034
  source 1..117: note = Description of Artificial Sequence: Synthetic polypeptide; note = VH of XENP024206

SEQ ID NO: 34236 - protein, 114 aa, synthetic construct
  source 1..114: note = Description of Artificial Sequence: Synthetic polypeptide; note = VL of XENP024206
DVLMTQSPDSLAVSLGERATINCKSSQSIVHSNGNTYLEWYQQKPGQSPKLLIYKVSNRQSGVPDRFSGSGSGTDFTLTISSLQAEDVAVYYCFQGSHVPNTFGGGTKVEIKGS

SEQ ID NO: 34237 - protein, 5 aa, synthetic construct
  source 1..5: note = Description of Artificial Sequence: Synthetic peptide; note = XENP024206 vhCDR1
HYGMN

SEQ ID NO: 34238 - protein, 17 aa, synthetic construct
  source 1..17: note = Description of Artificial Sequence: Synthetic peptide; note = XENP024206 vhCDR2
WINTYTGEPTYADGFTG

SEQ ID NO: 34239 - protein, 8 aa, synthetic construct
  source 1..8: note = Description of Artificial Sequence: Synthetic peptide; note = XENP024206 vhCDR3
DYYGSSPY

SEQ ID NO: 34240 - protein, 16 aa, synthetic construct
  source 1..16: note = Description of Artificial Sequence: Synthetic peptide; note = XENP024206 vlCDR1
KSSQSIVHSNGNTYLE

SEQ ID NO: 34241 - protein, 7 aa, synthetic construct
  source 1..7: note = Description of Artificial Sequence: Synthetic peptide; note = XENP024206 vlCDR2
KVSNRQS

SEQ ID NO: 34242 - protein, 9 aa, synthetic construct
  source 1..9: note = Description of Artificial Sequence: Synthetic peptide; note = XENP024206 vlCDR3
FQGSHVPNT

SEQ ID NO: 34243 - protein, 251 aa, synthetic construct
  source 1..251: note = Description of Artificial Sequence: Synthetic polypeptide; note = XENP024207 1C11_H3_L3.122_scFv
QIQLVQSGSELKKPGASVKVSCKASGYTFTHYGMNWVRQAPGQGLEWMGWINTYTGEPTYADGFTGRFVFSLDTSVSTAYLQISSLKAEDTAVYFCARDYYGSSPYWGQGTLVTVSSGKPGSGKPGSGKPGSGKPGSDVLMTQSPDSLAVSLGERATINCKSSQSIVHSNGNTYLEWYQQKPGQSPKLLIYKVSNRFSGIPDRFSGSGSGTDFTLTISSLQAEDVAVYYCFQGSHVPNTFGGGTKVEIKGS

SEQ ID NO: 34244 - protein, 117 aa, synthetic construct; identical to SEQ ID NO: 33034
  source 1..117: note = Description of Artificial Sequence: Synthetic polypeptide; note = VH of XENP024207

SEQ ID NO: 34245 - protein, 114 aa, synthetic construct
  source 1..114: note = Description of Artificial Sequence: Synthetic polypeptide; note = VL of XENP024207
DVLMTQSPDSLAVSLGERATINCKSSQSIVHSNGNTYLEWYQQKPGQSPKLLIYKVSNRFSGIPDRFSGSGSGTDFTLTISSLQAEDVAVYYCFQGSHVPNTFGGGTKVEIKGS

SEQ ID NO: 34246 - protein, 5 aa, synthetic construct
  source 1..5: note = Description of Artificial Sequence: Synthetic peptide; note = XENP024207 vhCDR1
HYGMN

SEQ ID NO: 34247 - protein, 17 aa, synthetic construct
  source 1..17: note = Description of Artificial Sequence: Synthetic peptide; note = XENP024207 vhCDR2
WINTYTGEPTYADGFTG

SEQ ID NO: 34248 - protein, 8 aa, synthetic construct
  source 1..8: note = Description of Artificial Sequence: Synthetic peptide; note = XENP024207 vhCDR3
DYYGSSPY

SEQ ID NO: 34249 - protein, 16 aa, synthetic construct
  source 1..16: note = Description of Artificial Sequence: Synthetic peptide; note = XENP024207 vlCDR1
KSSQSIVHSNGNTYLE

SEQ ID NO: 34250 - protein, 7 aa, synthetic construct
  source 1..7: note = Description of Artificial Sequence: Synthetic peptide; note = XENP024207 vlCDR2
KVSNRFS

SEQ ID NO: 34251 - protein, 9 aa, synthetic construct
  source 1..9: note = Description of Artificial Sequence: Synthetic peptide; note = XENP024207 vlCDR3
FQGSHVPNT

SEQ ID NO: 34252 - protein, 251 aa, synthetic construct
  source 1..251: note = Description of Artificial Sequence: Synthetic polypeptide; note = XENP024208 1C11_H3_L3.124_scFv
QIQLVQSGSELKKPGASVKVSCKASGYTFTHYGMNWVRQAPGQGLEWMGWINTYTGEPTYADGFTGRFVFSLDTSVSTAYLQISSLKAEDTAVYFCARDYYGSSPYWGQGTLVTVSSGKPGSGKPGSGKPGSGKPGSDVLMTQSPDSLAVSLGERATINCKSSQSIVHSNGNTYLEWYQQKPGQSPKLLIYKVSNRFSGVPARFSGSGSGTDFTLTISSLQAEDVAVYYCFQGSHVPNTFGGGTKVEIKGS

SEQ ID NO: 34253 - protein, 117 aa, synthetic construct; identical to SEQ ID NO: 33034
  source 1..117: note = Description of Artificial Sequence: Synthetic polypeptide; note = VH of XENP024208

SEQ ID NO: 34254 - protein, 114 aa, synthetic construct
  source 1..114: note = Description of Artificial Sequence: Synthetic polypeptide; note = VL of XENP024208
DVLMTQSPDSLAVSLGERATINCKSSQSIVHSNGNTYLEWYQQKPGQSPKLLIYKVSNRFSGVPARFSGSGSGTDFTLTISSLQAEDVAVYYCFQGSHVPNTFGGGTKVEIKGS

SEQ ID NO: 34255 - protein, 5 aa, synthetic construct
  source 1..5: note = Description of Artificial Sequence: Synthetic peptide; note = XENP024208 vhCDR1
HYGMN

SEQ ID NO: 34256 - protein, 17 aa, synthetic construct
  source 1..17: note = Description of Artificial Sequence: Synthetic peptide; note = XENP024208 vhCDR2
WINTYTGEPTYADGFTG

SEQ ID NO: 34257 - protein, 8 aa, synthetic construct
  source 1..8: note = Description of Artificial Sequence: Synthetic peptide; note = XENP024208 vhCDR3
DYYGSSPY

SEQ ID NO: 34258 - protein, 16 aa, synthetic construct
  source 1..16: note = Description of Artificial Sequence: Synthetic peptide; note = XENP024208 vlCDR1
KSSQSIVHSNGNTYLE

SEQ ID NO: 34259 - protein, 7 aa, synthetic construct
  source 1..7: note = Description of Artificial Sequence: Synthetic peptide; note = XENP024208 vlCDR2
KVSNRFS

SEQ ID NO: 34260 - protein, 9 aa, synthetic construct
  source 1..9: note = Description of Artificial Sequence: Synthetic peptide; note = XENP024208 vlCDR3
FQGSHVPNT

SEQ ID NO: 34261 - protein, 251 aa, synthetic construct
  source 1..251: note = Description of Artificial Sequence: Synthetic polypeptide; note = XENP024209 1C11_H3_L3.125_scFv
QIQLVQSGSELKKPGASVKVSCKASGYTFTHYGMNWVRQAPGQGLEWMGWINTYTGEPTYADGFTGRFVFSLDTSVSTAYLQISSLKAEDTAVYFCARDYYGSSPYWGQGTLVTVSSGKPGSGKPGSGKPGSGKPGSDVLMTQSPDSLAVSLGERATINCKSSQSIVHSNGNTYLEWYQQKPGQSPKLLIYKVSNRFSGVPDRFSGSGSGTDFTLTISSVEAEDVAVYYCFQGSHVPNTFGGGTKVEIKGS

SEQ ID NO: 34262 - protein, 117 aa, synthetic construct; identical to SEQ ID NO: 33034
  source 1..117: note = Description of Artificial Sequence: Synthetic polypeptide; note = VH of XENP024209

SEQ ID NO: 34263 - protein, 114 aa, synthetic construct
  source 1..114: note = Description of Artificial Sequence: Synthetic polypeptide; note = VL of XENP024209
DVLMTQSPDSLAVSLGERATINCKSSQSIVHSNGNTYLEWYQQKPGQSPKLLIYKVSNRFSGVPDRFSGSGSGTDFTLTISSVEAEDVAVYYCFQGSHVPNTFGGGTKVEIKGS

SEQ ID NO: 34264 - protein, 5 aa, synthetic construct
  source 1..5: note = Description of Artificial Sequence: Synthetic peptide; note = XENP024209 vhCDR1
HYGMN

SEQ ID NO: 34265 - protein, 17 aa, synthetic construct
  source 1..17: note = Description of Artificial Sequence: Synthetic peptide; note = XENP024209 vhCDR2
WINTYTGEPTYADGFTG

SEQ ID NO: 34266 - protein, 8 aa, synthetic construct
  source 1..8: note = Description of Artificial Sequence: Synthetic peptide; note = XENP024209 vhCDR3
DYYGSSPY

SEQ ID NO: 34267 - protein, 16 aa, synthetic construct
  source 1..16: note = Description of Artificial Sequence: Synthetic peptide; note = XENP024209 vlCDR1
KSSQSIVHSNGNTYLE

SEQ ID NO: 34268 - protein, 7 aa, synthetic construct
  source 1..7: note = Description of Artificial Sequence: Synthetic peptide; note = XENP024209 vlCDR2
KVSNRFS

SEQ ID NO: 34269 - protein, 9 aa, synthetic construct
  source 1..9: note = Description of Artificial Sequence: Synthetic peptide; note = XENP024209 vlCDR3
FQGSHVPNT

SEQ ID NO: 34270 - protein, 251 aa, synthetic construct
  source 1..251: note = Description of Artificial Sequence: Synthetic polypeptide; note = XENP024210 1C11_H3_L3.132_scFv
QIQLVQSGSELKKPGASVKVSCKASGYTFTHYGMNWVRQAPGQGLEWMGWINTYTGEPTYADGFTGRFVFSLDTSVSTAYLQISSLKAEDTAVYFCARDYYGSSPYWGQGTLVTVSSGKPGSGKPGSGKPGSGKPGSDVLMTQSPDSLAVSLGERATINCKSSQSIVHSNGNTYLEWYQQKPGQSPKLLIYKVSNRFSGVPDRFSGSGSGTDFTLTISSLQAEDVAVYYCFQGSHVPNTFGPGTKVEIKGS

SEQ ID NO: 34271 - protein, 117 aa, synthetic construct; identical to SEQ ID NO: 33034
  source 1..117: note = Description of Artificial Sequence: Synthetic polypeptide; note = VH of XENP024210

SEQ ID NO: 34272 - protein, 114 aa, synthetic construct
  source 1..114: note = Description of Artificial Sequence: Synthetic polypeptide; note = VL of XENP024210
DVLMTQSPDSLAVSLGERATINCKSSQSIVHSNGNTYLEWYQQKPGQSPKLLIYKVSNRFSGVPDRFSGSGSGTDFTLTISSLQAEDVAVYYCFQGSHVPNTFGPGTKVEIKGS

SEQ ID NO: 34273 - protein, 5 aa, synthetic construct
  source 1..5: note = Description of Artificial Sequence: Synthetic peptide; note = XENP024210 vhCDR1
HYGMN

SEQ ID NO: 34274 - protein, 17 aa, synthetic construct
  source 1..17: note = Description of Artificial Sequence: Synthetic peptide; note = XENP024210 vhCDR2
WINTYTGEPTYADGFTG

SEQ ID NO: 34275 - protein, 8 aa, synthetic construct
  source 1..8: note = Description of Artificial Sequence: Synthetic peptide; note = XENP024210 vhCDR3
DYYGSSPY

SEQ ID NO: 34276 - protein, 16 aa, synthetic construct
  source 1..16: note = Description of Artificial Sequence: Synthetic peptide; note = XENP024210 vlCDR1
KSSQSIVHSNGNTYLE

SEQ ID NO: 34277 - protein, 7 aa, synthetic construct
  source 1..7: note = Description of Artificial Sequence: Synthetic peptide; note = XENP024210 vlCDR2
KVSNRFS

SEQ ID NO: 34278 - protein, 9 aa, synthetic construct
  source 1..9: note = Description of Artificial Sequence: Synthetic peptide; note = XENP024210 vlCDR3
FQGSHVPNT

SEQ ID NO: 34279 - protein, 251 aa, synthetic construct
  source 1..251: note = Description of Artificial Sequence: Synthetic polypeptide; note = XENP024211 1C11_H3.78_L3_scFv
QIQLVQSGPELKKPGASVKVSCKASGYTFTHYGMNWVRQAPGQGLEWMGWINTNTGEPTYADGFTGRFVFSVDTSQSTAYLQISSLKAEDTAVYFCARDYYGSSPYWGQGTLVTVSSGKPGSGKPGSGKPGSGKPGSDVLMTQSPDSLAVSLGERATINCKSSQSIVHSNGNTYLEWYQQKPGQSPKLLIYKVSNRFSGVPDRFSGSGSGTDFTLTISSLQAEDVAVYYCFQGSHVPNTFGGGTKVEIKGS

SEQ ID NO: 34280 - protein, 117 aa, synthetic construct
  source 1..117: note = Description of Artificial Sequence: Synthetic polypeptide; note = VH of XENP024211
QIQLVQSGPELKKPGASVKVSCKASGYTFTHYGMNWVRQAPGQGLEWMGWINTNTGEPTYADGFTGRFVFSVDTSQSTAYLQISSLKAEDTAVYFCARDYYGSSPYWGQGTLVTVSS

SEQ ID NO: 34281 - protein, 114 aa, synthetic construct; identical to SEQ ID NO: 33651
  source 1..114: note = Description of Artificial Sequence: Synthetic polypeptide; note = VL of XENP024211

SEQ ID NO: 34282 - protein, 5 aa, synthetic construct
  source 1..5: note = Description of Artificial Sequence: Synthetic peptide; note = XENP024211 vhCDR1
HYGMN

SEQ ID NO: 34283 - protein, 17 aa, synthetic construct
  source 1..17: note = Description of Artificial Sequence: Synthetic peptide; note = XENP024211 vhCDR2
WINTNTGEPTYADGFTG

SEQ ID NO: 34284 - protein, 8 aa, synthetic construct
  source 1..8: note = Description of Artificial Sequence: Synthetic peptide; note = XENP024211 vhCDR3
DYYGSSPY

SEQ ID NO: 34285 - protein, 16 aa, synthetic construct
  source 1..16: note = Description of Artificial Sequence: Synthetic peptide; note = XENP024211 vlCDR1
KSSQSIVHSNGNTYLE

SEQ ID NO: 34286 - protein, 7 aa, synthetic construct
  source 1..7: note = Description of Artificial Sequence: Synthetic peptide; note = XENP024211 vlCDR2
KVSNRFS

SEQ ID NO: 34287 - protein, 9 aa, synthetic construct
  source 1..9: note = Description of Artificial Sequence: Synthetic peptide; note = XENP024211 vlCDR3
FQGSHVPNT

SEQ ID NO: 34288 - protein, 251 aa, synthetic construct
  source 1..251: note = Description of Artificial Sequence: Synthetic polypeptide; note = XENP024212 1C11_H3.80_L3_scFv
QIQLVQSGSELKKPGASVKVSCKASGYTFTHYGMNWVRQAPGQGLEWMGWINTNTGEPTYADGFTGRFVFSVDTSQSTAYLQISSLKAEDTAVYYCARDYYGSSPYWGQGTLVTVSSGKPGSGKPGSGKPGSGKPGSDVLMTQSPDSLAVSLGERATINCKSSQSIVHSNGNTYLEWYQQKPGQSPKLLIYKVSNRFSGVPDRFSGSGSGTDFTLTISSLQAEDVAVYYCFQGSHVPNTFGGGTKVEIKGS

SEQ ID NO: 34289 - protein, 117 aa, synthetic construct
  source 1..117: note = Description of Artificial Sequence: Synthetic polypeptide; note = VH of XENP024212
QIQLVQSGSELKKPGASVKVSCKASGYTFTHYGMNWVRQAPGQGLEWMGWINTNTGEPTYADGFTGRFVFSVDTSQSTAYLQISSLKAEDTAVYYCARDYYGSSPYWGQGTLVTVSS

SEQ ID NO: 34290 - protein, 114 aa, synthetic construct; identical to SEQ ID NO: 33651
  source 1..114: note = Description of Artificial Sequence: Synthetic polypeptide; note = VL of XENP024212

SEQ ID NO: 34291 - protein, 5 aa, synthetic construct
  source 1..5: note = Description of Artificial Sequence: Synthetic peptide; note = XENP024212 vhCDR1
HYGMN

SEQ ID NO: 34292 - protein, 17 aa, synthetic construct
  source 1..17: note = Description of Artificial Sequence: Synthetic peptide; note = XENP024212 vhCDR2
WINTNTGEPTYADGFTG

SEQ ID NO: 34293 - protein, 8 aa, synthetic construct
  source 1..8: note = Description of Artificial Sequence: Synthetic peptide; note = XENP024212 vhCDR3
DYYGSSPY

SEQ ID NO: 34294 - protein, 16 aa, synthetic construct
  source 1..16: note = Description of Artificial Sequence: Synthetic peptide; note = XENP024212 vlCDR1
KSSQSIVHSNGNTYLE

SEQ ID NO: 34295 - protein, 7 aa, synthetic construct
  source 1..7: note = Description of Artificial Sequence: Synthetic peptide; note = XENP024212 vlCDR2
KVSNRFS

SEQ ID NO: 34296 - protein, 9 aa, synthetic construct
  source 1..9: note = Description of Artificial Sequence: Synthetic peptide; note = XENP024212 vlCDR3
FQGSHVPNT

SEQ ID NO: 34297 - protein, 251 aa, synthetic construct
  source 1..251: note = Description of Artificial Sequence: Synthetic polypeptide; note = XENP024213 1C11_H3.81_L3_scFv
QIQLVQSGSELKKPGASVKVSCKASGYTFTHYGMNWVRQAPGQGLEWMGWINTYTGEPTYADKFKGRFVFSLDTSVSTAYLQISSLKAEDTAVYFCARDYYGSSPYWGQGTLVTVSSGKPGSGKPGSGKPGSGKPGSDVLMTQSPDSLAVSLGERATINCKSSQSIVHSNGNTYLEWYQQKPGQSPKLLIYKVSNRFSGVPDRFSGSGSGTDFTLTISSLQAEDVAVYYCFQGSHVPNTFGGGTKVEIKGS

SEQ ID NO: 34298 - protein, 117 aa, synthetic construct
  source 1..117: note = Description of Artificial Sequence: Synthetic polypeptide; note = VH of XENP024213
QIQLVQSGSELKKPGASVKVSCKASGYTFTHYGMNWVRQAPGQGLEWMGWINTYTGEPTYADKFKGRFVFSLDTSVSTAYLQISSLKAEDTAVYFCARDYYGSSPYWGQGTLVTVSS

SEQ ID NO: 34299 - protein, 114 aa, synthetic construct; identical to SEQ ID NO: 33651
  source 1..114: note = Description of Artificial Sequence: Synthetic polypeptide; note = VL of XENP024213

SEQ ID NO: 34300 - protein, 5 aa, synthetic construct
  source 1..5: note = Description of Artificial Sequence: Synthetic peptide; note = XENP024213 vhCDR1
HYGMN

SEQ ID NO: 34301 - protein, 17 aa, synthetic construct
  source 1..17: note = Description of Artificial Sequence: Synthetic peptide; note = XENP024213 vhCDR2
WINTYTGEPTYADKFKG

SEQ ID NO: 34302 - protein, 8 aa, synthetic construct
  source 1..8: note = Description of Artificial Sequence: Synthetic peptide; note = XENP024213 vhCDR3
DYYGSSPY

SEQ ID NO: 34303 - protein, 16 aa, synthetic construct
  source 1..16: note = Description of Artificial Sequence: Synthetic peptide; note = XENP024213 vlCDR1
KSSQSIVHSNGNTYLE

SEQ ID NO: 34304 - protein, 7 aa, synthetic construct
  source 1..7: note = Description of Artificial Sequence: Synthetic peptide; note = XENP024213 vlCDR2
KVSNRFS

SEQ ID NO: 34305 - protein, 9 aa, synthetic construct
  source 1..9: note = Description of Artificial Sequence: Synthetic peptide; note = XENP024213 vlCDR3
FQGSHVPNT

SEQ ID NO: 34306 - protein, 251 aa, synthetic construct
  source 1..251: note = Description of Artificial Sequence: Synthetic polypeptide; note = XENP024214 1C11_H3.82_L3_scFv
QIQLVQSGSELKKPGASVKVSCKASGYTFTHYGMNWVRQAPGQGLEWMGWINTYTGEPTYADKFQGRFVFSLDTSVSTAYLQISSLKAEDTAVYFCARDYYGSSPYWGQGTLVTVSSGKPGSGKPGSGKPGSGKPGSDVLMTQSPDSLAVSLGERATINCKSSQSIVHSNGNTYLEWYQQKPGQSPKLLIYKVSNRFSGVPDRFSGSGSGTDFTLTISSLQAEDVAVYYCFQGSHVPNTFGGGTKVEIKGS

SEQ ID NO: 34307 - protein, 117 aa, synthetic construct
  source 1..117: note = Description of Artificial Sequence: Synthetic polypeptide; note = VH of XENP024214
QIQLVQSGSELKKPGASVKVSCKASGYTFTHYGMNWVRQAPGQGLEWMGWINTYTGEPTYADKFQGRFVFSLDTSVSTAYLQISSLKAEDTAVYFCARDYYGSSPYWGQGTLVTVSS

SEQ ID NO: 34308 - protein, 114 aa, synthetic construct; identical to SEQ ID NO: 33651
  source 1..114: note = Description of Artificial Sequence: Synthetic polypeptide; note = VL of XENP024214

SEQ ID NO: 34309 - protein, 5 aa, synthetic construct
  source 1..5: note = Description of Artificial Sequence: Synthetic peptide; note = XENP024214 vhCDR1
HYGMN

SEQ ID NO: 34310 - protein, 17 aa, synthetic construct
  source 1..17: note = Description of Artificial Sequence: Synthetic peptide; note = XENP024214 vhCDR2
WINTYTGEPTYADKFQG

SEQ ID NO: 34311 - protein, 8 aa, synthetic construct
  source 1..8: note = Description of Artificial Sequence: Synthetic peptide; note = XENP024214 vhCDR3
DYYGSSPY

SEQ ID NO: 34312 - protein, 16 aa, synthetic construct
  source 1..16: note = Description of Artificial Sequence: Synthetic peptide; note = XENP024214 vlCDR1
KSSQSIVHSNGNTYLE

SEQ ID NO: 34313 - protein, 7 aa, synthetic construct
  source 1..7: note = Description of Artificial Sequence: Synthetic peptide; note = XENP024214 vlCDR2
KVSNRFS

SEQ ID NO: 34314 - protein, 9 aa, synthetic construct
  source 1..9: note = Description of Artificial Sequence: Synthetic peptide; note = XENP024214 vlCDR3
FQGSHVPNT

SEQ ID NO: 34315 - protein, 251 aa, synthetic construct
  source 1..251: note = Description of Artificial Sequence: Synthetic polypeptide; note = XENP024215 1C11_H3.83_L3_scFv
QIQLVQSGSELKKPGASVKVSCKASGYTFTHYGMNWVRQAPGQGLEWMGWINTNTGEPTYADGFTGRFVFSVDTSQSTAYLQISSLKAEDTAVYFCARDYYGSSPYWGQGTLVTVSSGKPGSGKPGSGKPGSGKPGSDVLMTQSPDSLAVSLGERATINCKSSQSIVHSNGNTYLEWYQQKPGQSPKLLIYKVSNRFSGVPDRFSGSGSGTDFTLTISSLQAEDVAVYYCFQGSHVPNTFGGGTKVEIKGS

SEQ ID NO: 34316 - protein, 117 aa, synthetic construct
  source 1..117: note = Description of Artificial Sequence: Synthetic polypeptide; note = VH of XENP024215
QIQLVQSGSELKKPGASVKVSCKASGYTFTHYGMNWVRQAPGQGLEWMGWINTNTGEPTYADGFTGRFVFSVDTSQSTAYLQISSLKAEDTAVYFCARDYYGSSPYWGQGTLVTVSS

SEQ ID NO: 34317 - protein, 114 aa, synthetic construct; identical to SEQ ID NO: 33651
  source 1..114: note = Description of Artificial Sequence: Synthetic polypeptide; note = VL of XENP024215

SEQ ID NO: 34318 - protein, 5 aa, synthetic construct
  source 1..5: note = Description of Artificial Sequence: Synthetic peptide; note = XENP024215 vhCDR1
HYGMN

SEQ ID NO: 34319 - protein, 17 aa, synthetic construct
  source 1..17: note = Description of Artificial Sequence: Synthetic peptide; note = XENP024215 vhCDR2
WINTNTGEPTYADGFTG

SEQ ID NO: 34320 - protein, 8 aa, synthetic construct
  source 1..8: note = Description of Artificial Sequence: Synthetic peptide; note = XENP024215 vhCDR3
DYYGSSPY

SEQ ID NO: 34321 - protein, 16 aa, synthetic construct
  source 1..16: note = Description of Artificial Sequence: Synthetic peptide; note = XENP024215 vlCDR1
KSSQSIVHSNGNTYLE

SEQ ID NO: 34322 - protein, 7 aa, synthetic construct
  source 1..7: note = Description of Artificial Sequence: Synthetic peptide; note = XENP024215 vlCDR2
KVSNRFS

SEQ ID NO: 34323 - protein, 9 aa, synthetic construct
  source 1..9: note = Description of Artificial Sequence: Synthetic peptide; note = XENP024215 vlCDR3
FQGSHVPNT

SEQ ID NO: 34324 - protein, 251 aa, synthetic construct
  source 1..251: note = Description of Artificial Sequence: Synthetic polypeptide; note = XENP024216 1C11_H3.84_L3_scFv
QIQLVQSGSELKKPGASVKVSCKASGYTFTHYGMNWVRQAPGQGLEWMGWINTYTGEPTYADKFKGRFVFSLDTSQSTAYLQISSLKAEDTAVYFCARDYYGSSPYWGQGTLVTVSSGKPGSGKPGSGKPGSGKPGSDVLMTQSPDSLAVSLGERATINCKSSQSIVHSNGNTYLEWYQQKPGQSPKLLIYKVSNRFSGVPDRFSGSGSGTDFTLTISSLQAEDVAVYYCFQGSHVPNTFGGGTKVEIKGS

SEQ ID NO: 34325 - protein, 117 aa, synthetic construct
  source 1..117: note = Description of Artificial Sequence: Synthetic polypeptide; note = VH of XENP024216
QIQLVQSGSELKKPGASVKVSCKASGYTFTHYGMNWVRQAPGQGLEWMGWINTYTGEPTYADKFKGRFVFSLDTSQSTAYLQISSLKAEDTAVYFCARDYYGSSPYWGQGTLVTVSS

SEQ ID NO: 34326 - protein, 114 aa, synthetic construct; identical to SEQ ID NO: 33651
  source 1..114: note = Description of Artificial Sequence: Synthetic polypeptide; note = VL of XENP024216

SEQ ID NO: 34327 - protein, 5 aa, synthetic construct
  source 1..5: note = Description of Artificial Sequence: Synthetic peptide; note = XENP024216 vhCDR1
HYGMN

SEQ ID NO: 34328 - protein, 17 aa, synthetic construct
  source 1..17: note = Description of Artificial Sequence: Synthetic peptide; note = XENP024216 vhCDR2
WINTYTGEPTYADKFKG

SEQ ID NO: 34329 - protein, 8 aa, synthetic construct
  source 1..8: note = Description of Artificial Sequence: Synthetic peptide; note = XENP024216 vhCDR3
DYYGSSPY

SEQ ID NO: 34330 - protein, 16 aa, synthetic construct
  source 1..16: note = Description of Artificial Sequence: Synthetic peptide; note = XENP024216 vlCDR1
KSSQSIVHSNGNTYLE

SEQ ID NO: 34331 - protein, 7 aa, synthetic construct
  source 1..7: note = Description of Artificial Sequence: Synthetic peptide; note = XENP024216 vlCDR2
KVSNRFS

SEQ ID NO: 34332 - protein, 9 aa, synthetic construct
  source 1..9: note = Description of Artificial Sequence: Synthetic peptide; note = XENP024216 vlCDR3
FQGSHVPNT

SEQ ID NO: 34333 - protein, 251 aa, synthetic construct
  source 1..251: note = Description of Artificial Sequence: Synthetic polypeptide; note = XENP024217 1C11_H3.85_L3_scFv
QIQLVQSGSELKKPGASVKVSCKASGYTFTHYGMNWVRQAPGQGLEWMGWINTYTGEPTYADKFQGRFVFSLDTSQSTAYLQISSLKAEDTAVYFCARDYYGSSPYWGQGTLVTVSSGKPGSGKPGSGKPGSGKPGSDVLMTQSPDSLAVSLGERATINCKSSQSIVHSNGNTYLEWYQQKPGQSPKLLIYKVSNRFSGVPDRFSGSGSGTDFTLTISSLQAEDVAVYYCFQGSHVPNTFGGGTKVEIKGS

SEQ ID NO: 34334 - protein, 117 aa, synthetic construct
  source 1..117: note = Description of Artificial Sequence: Synthetic polypeptide; note = VH of XENP024217
QIQLVQSGSELKKPGASVKVSCKASGYTFTHYGMNWVRQAPGQGLEWMGWINTYTGEPTYADKFQGRFVFSLDTSQSTAYLQISSLKAEDTAVYFCARDYYGSSPYWGQGTLVTVSS

SEQ ID NO: 34335 - protein, 114 aa, synthetic construct; identical to SEQ ID NO: 33651
  source 1..114: note = Description of Artificial Sequence: Synthetic polypeptide; note = VL of XENP024217

SEQ ID NO: 34336 - protein, 5 aa, synthetic construct
  source 1..5: note = Description of Artificial Sequence: Synthetic peptide; note = XENP024217 vhCDR1
HYGMN

SEQ ID NO: 34337 - protein, 17 aa, synthetic construct
  source 1..17: note = Description of Artificial Sequence: Synthetic peptide; note = XENP024217 vhCDR2
WINTYTGEPTYADKFQG

SEQ ID NO: 34338 - protein, 8 aa, synthetic construct
  source 1..8: note = Description of Artificial Sequence: Synthetic peptide; note = XENP024217 vhCDR3
DYYGSSPY

SEQ ID NO: 34339 - protein, 16 aa, synthetic construct
  source 1..16: note = Description of Artificial Sequence: Synthetic peptide; note = XENP024217 vlCDR1
KSSQSIVHSNGNTYLE

SEQ ID NO: 34340 - protein, 7 aa, synthetic construct
  source 1..7: note = Description of Artificial Sequence: Synthetic peptide; note = XENP024217 vlCDR2
KVSNRFS

SEQ ID NO: 34341 - protein, 9 aa, synthetic construct
  source 1..9: note = Description of Artificial Sequence: Synthetic peptide; note = XENP024217 vlCDR3
FQGSHVPNT

SEQ ID NO: 34342 - protein, 251 aa, synthetic construct
  source 1..251: note = Description of Artificial Sequence: Synthetic polypeptide; note = XENP024218 1C11_H3.86_L3_scFv
EIQLVQSGSELKKPGASVKVSCKASGYTFTHYGMNWVRQAPGQGLEWMGWINTYTGEPTYADGFTGRFVFSLDTSVSTAYLQISSLKAEDTAVYFCARDYYGSSPYWGQGTLVTVSSGKPGSGKPGSGKPGSGKPGSDVLMTQSPDSLAVSLGERATINCKSSQSIVHSNGNTYLEWYQQKPGQSPKLLIYKVSNRFSGVPDRFSGSGSGTDFTLTISSLQAEDVAVYYCFQGSHVPNTFGGGTKVEIKGS

SEQ ID NO: 34343 - protein, 117 aa, synthetic construct
  source 1..117: note = Description of Artificial Sequence: Synthetic polypeptide; note = VH of XENP024218
EIQLVQSGSELKKPGASVKVSCKASGYTFTHYGMNWVRQAPGQGLEWMGWINTYTGEPTYADGFTGRFVFSLDTSVSTAYLQISSLKAEDTAVYFCARDYYGSSPYWGQGTLVTVSS

SEQ ID NO: 34344 - protein, 114 aa, synthetic construct; identical to SEQ ID NO: 33651
  source 1..114: note = Description of Artificial Sequence: Synthetic polypeptide; note = VL of XENP024218

SEQ ID NO: 34345 - protein, 5 aa, synthetic construct
  source 1..5: note = Description of Artificial Sequence: Synthetic peptide; note = XENP024218 vhCDR1
HYGMN

SEQ ID NO: 34346 - protein, 17 aa, synthetic construct
  source 1..17: note = Description of Artificial Sequence: Synthetic peptide; note = XENP024218 vhCDR2
WINTYTGEPTYADGFTG

SEQ ID NO: 34347 - protein, 8 aa, synthetic construct
  source 1..8: note = Description of Artificial Sequence: Synthetic peptide; note = XENP024218 vhCDR3
DYYGSSPY

SEQ ID NO: 34348 - protein, 16 aa, synthetic construct
  source 1..16: note = Description of Artificial Sequence: Synthetic peptide; note = XENP024218 vlCDR1
KSSQSIVHSNGNTYLE

SEQ ID NO: 34349 - protein, 7 aa, synthetic construct
  source 1..7: note = Description of Artificial Sequence: Synthetic peptide; note = XENP024218 vlCDR2
KVSNRFS

SEQ ID NO: 34350 - protein, 9 aa, synthetic construct
  source 1..9: note = Description of Artificial Sequence: Synthetic peptide; note = XENP024218 vlCDR3
FQGSHVPNT

SEQ ID NO: 34351 - protein, 251 aa, synthetic construct
  source 1..251: note = Description of Artificial Sequence: Synthetic polypeptide; note = XENP024219 1C11_H3.88_L3_scFv
QIQLVESGSELKKPGASVKVSCKASGYTFTHYGMNWVRQAPGQGLEWMGWINTYTGEPTYADGFTGRFVFSLDTSVSTAYLQISSLKAEDTAVYFCARDYYGSSPYWGQGTLVTVSSGKPGSGKPGSGKPGSGKPGSDVLMTQSPDSLAVSLGERATINCKSSQSIVHSNGNTYLEWYQQKPGQSPKLLIYKVSNRFSGVPDRFSGSGSGTDFTLTISSLQAEDVAVYYCFQGSHVPNTFGGGTKVEIKGS

SEQ ID NO: 34352 - protein, 117 aa, synthetic construct
  source 1..117: note = Description of Artificial Sequence: Synthetic polypeptide; note = VH of XENP024219
QIQLVESGSELKKPGASVKVSCKASGYTFTHYGMNWVRQAPGQGLEWMGWINTYTGEPTYADGFTGRFVFSLDTSVSTAYLQISSLKAEDTAVYFCARDYYGSSPYWGQGTLVTVSS

SEQ ID NO: 34353 - protein, 114 aa, synthetic construct; identical to SEQ ID NO: 33651
  source 1..114: note = Description of Artificial Sequence: Synthetic polypeptide; note = VL of XENP024219

SEQ ID NO: 34354 - protein, 5 aa, synthetic construct
  source 1..5: note = Description of Artificial Sequence: Synthetic peptide; note = XENP024219 vhCDR1
HYGMN

SEQ ID NO: 34355 - protein, 17 aa, synthetic construct
  source 1..17: note = Description of Artificial Sequence: Synthetic peptide; note = XENP024219 vhCDR2
WINTYTGEPTYADGFTG

SEQ ID NO: 34356 - protein, 8 aa, synthetic construct
  source 1..8: note = Description of Artificial Sequence: Synthetic peptide; note = XENP024219 vhCDR3
DYYGSSPY

SEQ ID NO: 34357 - protein, 16 aa, synthetic construct
  source 1..16: note = Description of Artificial Sequence: Synthetic peptide; note = XENP024219 vlCDR1
KSSQSIVHSNGNTYLE

SEQ ID NO: 34358 - protein, 7 aa, synthetic construct
  source 1..7: note = Description of Artificial Sequence: Synthetic peptide; note = XENP024219 vlCDR2
KVSNRFS

SEQ ID NO: 34359 - protein, 9 aa, synthetic construct
  source 1..9: note = Description of Artificial Sequence: Synthetic peptide; note = XENP024219 vlCDR3
FQGSHVPNT

SEQ ID NO: 34360 - protein, 251 aa, synthetic construct
  source 1..251: note = Description of Artificial Sequence: Synthetic polypeptide; note = XENP024220 1C11_H3.89_L3_scFv
QIQLVQSGSGLKKPGASVKVSCKASGYTFTHYGMNWVRQAPGQGLEWMGWINTYTGEPTYADGFTGRFVFSLDTSVSTAYLQISSLKAEDTAVYFCARDYYGSSPYWGQGTLVTVSSGKPGSGKPGSGKPGSGKPGSDVLMTQSPDSLAVSLGERATINCKSSQSIVHSNGNTYLEWYQQKPGQSPKLLIYKVSNRFSGVPDRFSGSGSGTDFTLTISSLQAEDVAVYYCFQGSHVPNTFGGGTKVEIKGS

SEQ ID NO: 34361 - protein, 117 aa, synthetic construct
  source 1..117: note = Description of Artificial Sequence: Synthetic polypeptide; note = VH of XENP024220
QIQLVQSGSGLKKPGASVKVSCKASGYTFTHYGMNWVRQAPGQGLEWMGWINTYTGEPTYADGFTGRFVFSLDTSVSTAYLQISSLKAEDTAVYFCARDYYGSSPYWGQGTLVTVSS

SEQ ID NO: 34362 - protein, 114 aa, synthetic construct; identical to SEQ ID NO: 33651
  source 1..114: note = Description of Artificial Sequence: Synthetic polypeptide; note = VL of XENP024220

SEQ ID NO: 34363 - protein, 5 aa, synthetic construct
  source 1..5: note = Description of Artificial Sequence: Synthetic peptide; note = XENP024220 vhCDR1
HYGMN

SEQ ID NO: 34364 - protein, 17 aa, synthetic construct
  source 1..17: note = Description of Artificial Sequence: Synthetic peptide; note = XENP024220 vhCDR2
WINTYTGEPTYADGFTG

SEQ ID NO: 34365 - protein, 8 aa, synthetic construct
  source 1..8: note = Description of Artificial Sequence: Synthetic peptide; note = XENP024220 vhCDR3
DYYGSSPY

SEQ ID NO: 34366 - protein, 16 aa, synthetic construct
  source 1..16: note = Description of Artificial Sequence: Synthetic peptide; note = XENP024220 vlCDR1
KSSQSIVHSNGNTYLE

SEQ ID NO: 34367 - protein, 7 aa, synthetic construct
  source 1..7: note = Description of Artificial Sequence: Synthetic peptide; note = XENP024220 vlCDR2
KVSNRFS

SEQ ID NO: 34368 - protein, 9 aa, synthetic construct
  source 1..9: note = Description of Artificial Sequence: Synthetic peptide; note = XENP024220 vlCDR3
FQGSHVPNT

SEQ ID NO: 34369 - protein, 251 aa, synthetic construct
  source 1..251: note = Description of Artificial Sequence: Synthetic polypeptide; note = XENP024221 1C11_H3.90_L3_scFv
QIQLVQSGSVLKKPGASVKVSCKASGYTFTHYGMNWVRQAPGQGLEWMGWINTYTGEPTYADGFTGRFVFSLDTSVSTAYLQISSLKAEDTAVYFCARDYYGSSPYWGQGTLVTVSSGKPGSGKPGSGKPGSGKPGSDVLMTQSPDSLAVSLGERATINCKSSQSIVHSNGNTYLEWYQQKPGQSPKLLIYKVSNRFSGVPDRFSGSGSGTDFTLTISSLQAEDVAVYYCFQGSHVPNTFGGGTKVEIKGS

SEQ ID NO: 34370 - protein, 117 aa, synthetic construct
  source 1..117: note = Description of Artificial Sequence: Synthetic polypeptide; note = VH of XENP024221
QIQLVQSGSVLKKPGASVKVSCKASGYTFTHYGMNWVRQAPGQGLEWMGWINTYTGEPTYADGFTGRFVFSLDTSVSTAYLQISSLKAEDTAVYFCARDYYGSSPYWGQGTLVTVSS

SEQ ID NO: 34371 - protein, 114 aa, synthetic construct; identical to SEQ ID NO: 33651
  source 1..114: note = Description of Artificial Sequence: Synthetic polypeptide; note = VL of XENP024221

SEQ ID NO: 34372 - protein, 5 aa, synthetic construct
  source 1..5: note = Description of Artificial Sequence: Synthetic peptide; note = XENP024221 vhCDR1
HYGMN

SEQ ID NO: 34373 - protein, 17 aa, synthetic construct
  source 1..17: note = Description of Artificial Sequence: Synthetic peptide; note = XENP024221 vhCDR2
WINTYTGEPTYADGFTG

SEQ ID NO: 34374 - protein, 8 aa, synthetic construct
  source 1..8: note = Description of Artificial Sequence: Synthetic peptide; note = XENP024221 vhCDR3
DYYGSSPY

SEQ ID NO: 34375 - protein, 16 aa, synthetic construct
  source 1..16: note = Description of Artificial Sequence: Synthetic peptide; note = XENP024221 vlCDR1
KSSQSIVHSNGNTYLE

SEQ ID NO: 34376 - protein, 7 aa, synthetic construct
  source 1..7: note = Description of Artificial Sequence: Synthetic peptide; note = XENP024221 vlCDR2
KVSNRFS

SEQ ID NO: 34377 - protein, 9 aa, synthetic construct
  source 1..9: note = Description of Artificial Sequence: Synthetic peptide; note = XENP024221 vlCDR3
FQGSHVPNT

SEQ ID NO: 34378 - protein, 251 aa, synthetic construct
  source 1..251: note = Description of Artificial Sequence: Synthetic polypeptide; note = XENP024222 1C11_H3.91_L3_scFv
QIQLVQSGSELVKPGASVKVSCKASGYTFTHYGMNWVRQAPGQGLEWMGWINTYTGEPTYADGFTGRFVFSLDTSVSTAYLQISSLKAEDTAVYFCARDYYGSSPYWGQGTLVTVSSGKPGSGKPGSGKPGSGKPGSDVLMTQSPDSLAVSLGERATINCKSSQSIVHSNGNTYLEWYQQKPGQSPKLLIYKVSNRFSGVPDRFSGSGSGTDFTLTISSLQAEDVAVYYCFQGSHVPNTFGGGTKVEIKGS

SEQ ID NO: 34379 - protein, 117 aa, synthetic construct
  source 1..117: note = Description of Artificial Sequence: Synthetic polypeptide; note = VH of XENP024222
QIQLVQSGSELVKPGASVKVSCKASGYTFTHYGMNWVRQAPGQGLEWMGWINTYTGEPTYADGFTGRFVFSLDTSVSTAYLQISSLKAEDTAVYFCARDYYGSSPYWGQGTLVTVSS

SEQ ID NO: 34380 - protein, 114 aa, synthetic construct; identical to SEQ ID NO: 33651
  source 1..114: note = Description of Artificial Sequence: Synthetic polypeptide; note = VL of XENP024222

SEQ ID NO: 34381 - protein, 5 aa, synthetic construct
  source 1..5: note = Description of Artificial Sequence: Synthetic peptide; note = XENP024222 vhCDR1
HYGMN

SEQ ID NO: 34382 - protein, 17 aa, synthetic construct
  source 1..17: note = Description of Artificial Sequence: Synthetic peptide; note = XENP024222 vhCDR2
WINTYTGEPTYADGFTG

SEQ ID NO: 34383 - protein, 8 aa, synthetic construct
  source 1..8: note = Description of Artificial Sequence: Synthetic peptide; note = XENP024222 vhCDR3
DYYGSSPY

SEQ ID NO: 34384 - protein, 16 aa, synthetic construct
  source 1..16: note = Description of Artificial Sequence: Synthetic peptide; note = XENP024222 vlCDR1
KSSQSIVHSNGNTYLE

SEQ ID NO: 34385 - protein, 7 aa, synthetic construct
  source 1..7: note = Description of Artificial Sequence: Synthetic peptide; note = XENP024222 vlCDR2
KVSNRFS

SEQ ID NO: 34386 - protein, 9 aa, synthetic construct
  source 1..9: note = Description of Artificial Sequence: Synthetic peptide; note = XENP024222 vlCDR3
FQGSHVPNT

SEQ ID NO: 34387 - protein, 251 aa, synthetic construct
  source 1..251: note = Description of Artificial Sequence: Synthetic polypeptide; note = XENP024223 1C11_H3.92_L3_scFv
QIQLVQSGSELKQPGASVKVSCKASGYTFTHYGMNWVRQAPGQGLEWMGWINTYTGEPTYADGFTGRFVFSLDTSVSTAYLQISSLKAEDTAVYFCARDYYGSSPYWGQGTLVTVSSGKPGSGKPGSGKPGSGKPGSDVLMTQSPDSLAVSLGERATINCKSSQSIVHSNGNTYLEWYQQKPGQSPKLLIYKVSNRFSGVPDRFSGSGSGTDFTLTISSLQAEDVAVYYCFQGSHVPNTFGGGTKVEIKGS

SEQ ID NO: 34388 - protein, 117 aa, synthetic construct
  source 1..117: note = Description of Artificial Sequence: Synthetic polypeptide; note = VH of XENP024223
QIQLVQSGSELKQPGASVKVSCKASGYTFTHYGMNWVRQAPGQGLEWMGWINTYTGEPTYADGFTGRFVFSLDTSVSTAYLQISSLKAEDTAVYFCARDYYGSSPYWGQGTLVTVSS

SEQ ID NO: 34389 - protein, 114 aa, synthetic construct; identical to SEQ ID NO: 33651
  source 1..114: note = Description of Artificial Sequence: Synthetic polypeptide; note = VL of XENP024223

SEQ ID NO: 34390 - protein, 5 aa, synthetic construct
  source 1..5: note = Description of Artificial Sequence: Synthetic peptide; note = XENP024223 vhCDR1
HYGMN

SEQ ID NO: 34391 - protein, 17 aa, synthetic construct
  source 1..17: note = Description of Artificial Sequence: Synthetic peptide; note = XENP024223 vhCDR2
WINTYTGEPTYADGFTG

SEQ ID NO: 34392 - protein, 8 aa, synthetic construct
  source 1..8: note = Description of Artificial Sequence: Synthetic peptide; note = XENP024223 vhCDR3
DYYGSSPY

SEQ ID NO: 34393 - protein, 16 aa, synthetic construct
  source 1..16: note = Description of Artificial Sequence: Synthetic peptide; note = XENP024223 vlCDR1
KSSQSIVHSNGNTYLE

SEQ ID NO: 34394 - protein, 7 aa, synthetic construct
  source 1..7: note = Description of Artificial Sequence: Synthetic peptide; note = XENP024223 vlCDR2
KVSNRFS

SEQ ID NO: 34395 - protein, 9 aa, synthetic construct
  source 1..9: note = Description of Artificial Sequence: Synthetic peptide; note = XENP024223 vlCDR3
FQGSHVPNT

SEQ ID NO: 34396 - protein, 251 aa, synthetic construct
  source 1..251: note = Description of Artificial Sequence: Synthetic polypeptide; note = XENP024224 1C11_H3.93_L3_scFv
QIQLVQSGSELKKPSASVKVSCKASGYTFTHYGMNWVRQAPGQGLEWMGWINTYTGEPTYADGFTGRFVFSLDTSVSTAYLQISSLKAEDTAVYFCARDYYGSSPYWGQGTLVTVSSGKPGSGKPGSGKPGSGKPGSDVLMTQSPDSLAVSLGERATINCKSSQSIVHSNGNTYLEWYQQKPGQSPKLLIYKVSNRFSGVPDRFSGSGSGTDFTLTISSLQAEDVAVYYCFQGSHVPNTFGGGTKVEIKGS

SEQ ID NO: 34397 - protein, 117 aa, synthetic construct
  source 1..117: note = Description of Artificial Sequence: Synthetic polypeptide; note = VH of XENP024224
QIQLVQSGSELKKPSASVKVSCKASGYTFTHYGMNWVRQAPGQGLEWMGWINTYTGEPTYADGFTGRFVFSLDTSVSTAYLQISSLKAEDTAVYFCARDYYGSSPYWGQGTLVTVSS

SEQ ID NO: 34398 - protein, 114 aa, synthetic construct; identical to SEQ ID NO: 33651
  source 1..114: note = Description of Artificial Sequence: Synthetic polypeptide; note = VL of XENP024224

SEQ ID NO: 34399 - protein, 5 aa, synthetic construct
  source 1..5: note = Description of Artificial Sequence: Synthetic peptide; note = XENP024224 vhCDR1
HYGMN

SEQ ID NO: 34400 - protein, 17 aa, synthetic construct
  source 1..17: note = Description of Artificial Sequence: Synthetic peptide; note = XENP024224 vhCDR2
WINTYTGEPTYADGFTG

SEQ ID NO: 34401 - protein, 8 aa, synthetic construct
  source 1..8: note = Description of Artificial Sequence: Synthetic peptide; note = XENP024224 vhCDR3
DYYGSSPY

SEQ ID NO: 34402 - protein, 16 aa, synthetic construct
  source 1..16: note = Description of Artificial Sequence: Synthetic peptide; note = XENP024224 vlCDR1
KSSQSIVHSNGNTYLE

SEQ ID NO: 34403 - protein, 7 aa, synthetic construct
  source 1..7: note = Description of Artificial Sequence: Synthetic peptide; note = XENP024224 vlCDR2
KVSNRFS

SEQ ID NO: 34404 - protein, 9 aa, synthetic construct
  source 1..9: note = Description of Artificial Sequence: Synthetic peptide; note = XENP024224 vlCDR3
FQGSHVPNT

SEQ ID NO: 34405 - protein, 251 aa, synthetic construct
  source 1..251: note = Description of Artificial Sequence: Synthetic polypeptide; note = XENP024225 1C11_H3.94_L3_scFv
QIQLVQSGSELKKPTASVKVSCKASGYTFTHYGMNWVRQAPGQGLEWMGWINTYTGEPTYADGFTGRFVFSLDTSVSTAYLQISSLKAEDTAVYFCARDYYGSSPYWGQGTLVTVSSGKPGSGKPGSGKPGSGKPGSDVLMTQSPDSLAVSLGERATINCKSSQSIVHSNGNTYLEWYQQKPGQSPKLLIYKVSNRFSGVPDRFSGSGSGTDFTLTISSLQAEDVAVYYCFQGSHVPNTFGGGTKVEIKGS

SEQ ID NO: 34406 - protein, 117 aa, synthetic construct
  source 1..117: note = Description of Artificial Sequence: Synthetic polypeptide; note = VH of XENP024225
QIQLVQSGSELKKPTASVKVSCKASGYTFTHYGMNWVRQAPGQGLEWMGWINTYTGEPTYADGFTGRFVFSLDTSVSTAYLQISSLKAEDTAVYFCARDYYGSSPYWGQGTLVTVSS

SEQ ID NO: 34407 - protein, 114 aa, synthetic construct; identical to SEQ ID NO: 33651
  source 1..114: note = Description of Artificial Sequence: Synthetic polypeptide; note = VL of XENP024225

SEQ ID NO: 34408 - protein, 5 aa, synthetic construct
  source 1..5: note = Description of Artificial Sequence: Synthetic peptide; note = XENP024225 vhCDR1
HYGMN

SEQ ID NO: 34409 - protein, 17 aa, synthetic construct
  source 1..17: note = Description of Artificial Sequence: Synthetic peptide; note = XENP024225 vhCDR2
WINTYTGEPTYADGFTG

SEQ ID NO: 34410 - protein, 8 aa, synthetic construct
  source 1..8: note = Description of Artificial Sequence: Synthetic peptide; note = XENP024225 vhCDR3
DYYGSSPY

SEQ ID NO: 34411 - protein, 16 aa, synthetic construct
  source 1..16: note = Description of Artificial Sequence: Synthetic peptide; note = XENP024225 vlCDR1
KSSQSIVHSNGNTYLE

SEQ ID NO: 34412 - protein, 7 aa, synthetic construct
  source 1..7: note = Description of Artificial Sequence: Synthetic peptide; note = XENP024225 vlCDR2
KVSNRFS

SEQ ID NO: 34413 - protein, 9 aa, synthetic construct
  source 1..9: note = Description of Artificial Sequence: Synthetic peptide; note = XENP024225 vlCDR3
FQGSHVPNT

SEQ ID NO: 34414 - protein, 251 aa, synthetic construct
  source 1..251: note = Description of Artificial Sequence: Synthetic polypeptide; note = XENP024226 1C11_H3.95_L3_scFv
QIQLVQSGSELKKPGGSVKVSCKASGYTFTHYGMNWVRQAPGQGLEWMGWINTYTGEPTYADGFTGRFVFSLDTSVSTAYLQISSLKAEDTAVYFCARDYYGSSPYWGQGTLVTVSSGKPGSGKPGSGKPGSGKPGSDVLMTQSPDSLAVSLGERATINCKSSQSIVHSNGNTYLEWYQQKPGQSPKLLIYKVSNRFSGVPDRFSGSGSGTDFTLTISSLQAEDVAVYYCFQGSHVPNTFGGGTKVEIKGS

SEQ ID NO: 34415 - protein, 117 aa, synthetic construct
  source 1..117: note = Description of Artificial Sequence: Synthetic polypeptide; note = VH of XENP024226
QIQLVQSGSELKKPGGSVKVSCKASGYTFTHYGMNWVRQAPGQGLEWMGWINTYTGEPTYADGFTGRFVFSLDTSVSTAYLQISSLKAEDTAVYFCARDYYGSSPYWGQGTLVTVSS

SEQ ID NO: 34416 - protein, 114 aa, synthetic construct; identical to SEQ ID NO: 33651
  source 1..114: note = Description of Artificial Sequence: Synthetic polypeptide; note = VL of XENP024226

SEQ ID NO: 34417 - protein, 5 aa, synthetic construct
  source 1..5: note = Description of Artificial Sequence: Synthetic peptide; note = XENP024226 vhCDR1
HYGMN

SEQ ID NO: 34418 - protein, 17 aa, synthetic construct
  source 1..17: note = Description of Artificial Sequence: Synthetic peptide; note = XENP024226 vhCDR2
WINTYTGEPTYADGFTG

SEQ ID NO: 34419 - protein, 8 aa, synthetic construct
  source 1..8: note = Description of Artificial Sequence: Synthetic peptide; note = XENP024226 vhCDR3
DYYGSSPY

SEQ ID NO: 34420 - protein, 16 aa, synthetic construct
  source 1..16: note = Description of Artificial Sequence: Synthetic peptide; note = XENP024226 vlCDR1
KSSQSIVHSNGNTYLE

SEQ ID NO: 34421 - protein, 7 aa, synthetic construct
  source 1..7: note = Description of Artificial Sequence: Synthetic peptide; note = XENP024226 vlCDR2
KVSNRFS

SEQ ID NO: 34422 - protein, 9 aa, synthetic construct
  source 1..9: note = Description of Artificial Sequence: Synthetic peptide; note = XENP024226 vlCDR3
FQGSHVPNT

SEQ ID NO: 34423 - protein, 251 aa, synthetic construct
  source 1..251: note = Description of Artificial Sequence: Synthetic polypeptide; note = XENP024227 1C11_H3.96_L3_scFv
QIQLVQSGSELKKPGQSVKVSCKASGYTFTHYGMNWVRQAPGQGLEWMGWINTYTGEPTYADGFTGRFVFSLDTSVSTAYLQISSLKAEDTAVYFCARDYYGSSPYWGQGTLVTVSSGKPGSGKPGSGKPGSGKPGSDVLMTQSPDSLAVSLGERATINCKSSQSIVHSNGNTYLEWYQQKPGQSPKLLIYKVSNRFSGVPDRFSGSGSGTDFTLTISSLQAEDVAVYYCFQGSHVPNTFGGGTKVEIKGS

SEQ ID NO: 34424 - protein, 117 aa, synthetic construct
  source 1..117: note = Description of Artificial Sequence: Synthetic polypeptide; note = VH of XENP024227
QIQLVQSGSELKKPGQSVKVSCKASGYTFTHYGMNWVRQAPGQGLEWMGWINTYTGEPTYADGFTGRFVFSLDTSVSTAYLQISSLKAEDTAVYFCARDYYGSSPYWGQGTLVTVSS

SEQ ID NO: 34425 - protein, 114 aa, synthetic construct; identical to SEQ ID NO: 33651
  source 1..114: note = Description of Artificial Sequence: Synthetic polypeptide; note = VL of XENP024227

SEQ ID NO: 34426 - protein, 5 aa, synthetic construct
  source 1..5: note = Description of Artificial Sequence: Synthetic peptide; note = XENP024227 vhCDR1
HYGMN

SEQ ID NO: 34427 - protein, 17 aa, synthetic construct
  source 1..17: note = Description of Artificial Sequence: Synthetic peptide; note = XENP024227 vhCDR2
WINTYTGEPTYADGFTG

SEQ ID NO: 34428 - protein, 8 aa, synthetic construct
  source 1..8: note = Description of Artificial Sequence: Synthetic peptide; note = XENP024227 vhCDR3
DYYGSSPY

SEQ ID NO: 34429 - protein, 16 aa, synthetic construct
  source 1..16: note = Description of Artificial Sequence: Synthetic peptide; note = XENP024227 vlCDR1
KSSQSIVHSNGNTYLE

SEQ ID NO: 34430 - protein, 7 aa, synthetic construct
  source 1..7: note = Description of Artificial Sequence: Synthetic peptide; note = XENP024227 vlCDR2
KVSNRFS

SEQ ID NO: 34431 - protein, 9 aa, synthetic construct
  source 1..9: note = Description of Artificial Sequence: Synthetic peptide; note = XENP024227 vlCDR3
FQGSHVPNT

SEQ ID NO: 34432 - protein, 251 aa, synthetic construct
  source 1..251: note = Description of Artificial Sequence: Synthetic polypeptide; note = XENP024228 1C11_H3.97_L3_scFv
QIQLVQSGSELKKPGESVKVSCKASGYTFTHYGMNWVRQAPGQGLEWMGWINTYTGEPTYADGFTGRFVFSLDTSVSTAYLQISSLKAEDTAVYFCARDYYGSSPYWGQGTLVTVSSGKPGSGKPGSGKPGSGKPGSDVLMTQSPDSLAVSLGERATINCKSSQSIVHSNGNTYLEWYQQKPGQSPKLLIYKVSNRFSGVPDRFSGSGSGTDFTLTISSLQAEDVAVYYCFQGSHVPNTFGGGTKVEIKGS

SEQ ID NO: 34433 - protein, 117 aa, synthetic construct
  source 1..117: note = Description of Artificial Sequence: Synthetic polypeptide; note = VH of XENP024228
QIQLVQSGSELKKPGESVKVSCKASGYTFTHYGMNWVRQAPGQGLEWMGWINTYTGEPTYADGFTGRFVFSLDTSVSTAYLQISSLKAEDTAVYFCARDYYGSSPYWGQGTLVTVSS

SEQ ID NO: 34434 - protein, 114 aa, synthetic construct; identical to SEQ ID NO: 33651
  source 1..114: note = Description of Artificial Sequence: Synthetic polypeptide; note = VL of XENP024228

SEQ ID NO: 34435 - protein, 5 aa, synthetic construct
  source 1..5: note = Description of Artificial Sequence: Synthetic peptide; note = XENP024228 vhCDR1
HYGMN

SEQ ID NO: 34436 - protein, 17 aa, synthetic construct
  source 1..17: note = Description of Artificial Sequence: Synthetic peptide; note = XENP024228 vhCDR2
WINTYTGEPTYADGFTG

SEQ ID NO: 34437 - protein, 8 aa, synthetic construct
  source 1..8: note = Description of Artificial Sequence: Synthetic peptide; note = XENP024228 vhCDR3
DYYGSSPY

SEQ ID NO: 34438 - protein, 16 aa, synthetic construct
  source 1..16: note = Description of Artificial Sequence: Synthetic peptide; note = XENP024228 vlCDR1
KSSQSIVHSNGNTYLE

SEQ ID NO: 34439 - protein, 7 aa, synthetic construct
  source 1..7: note = Description of Artificial Sequence: Synthetic peptide; note = XENP024228 vlCDR2
KVSNRFS

SEQ ID NO: 34440 - protein, 9 aa, synthetic construct
  source 1..9: note = Description of Artificial Sequence: Synthetic peptide; note = XENP024228 vlCDR3
FQGSHVPNT

SEQ ID NO: 34441 - protein, 251 aa, synthetic construct
  source 1..251: note = Description of Artificial Sequence: Synthetic polypeptide; note = XENP024229 1C11_H3.98_L3_scFv
QIQLVQSGSELKKPGRSVKVSCKASGYTFTHYGMNWVRQAPGQGLEWMGWINTYTGEPTYADGFTGRFVFSLDTSVSTAYLQISSLKAEDTAVYFCARDYYGSSPYWGQGTLVTVSSGKPGSGKPGSGKPGSGKPGSDVLMTQSPDSLAVSLGERATINCKSSQSIVHSNGNTYLEWYQQKPGQSPKLLIYKVSNRFSGVPDRFSGSGSGTDFTLTISSLQAEDVAVYYCFQGSHVPNTFGGGTKVEIKGS

SEQ ID NO: 34442 - protein, 117 aa, synthetic construct
  source 1..117: note = Description of Artificial Sequence: Synthetic polypeptide; note = VH of XENP024229
QIQLVQSGSELKKPGRSVKVSCKASGYTFTHYGMNWVRQAPGQGLEWMGWINTYTGEPTYADGFTGRFVFSLDTSVSTAYLQISSLKAEDTAVYFCARDYYGSSPYWGQGTLVTVSS

SEQ ID NO: 34443 - protein, 114 aa, synthetic construct; identical to SEQ ID NO: 33651
  source 1..114: note = Description of Artificial Sequence: Synthetic polypeptide; note = VL of XENP024229

SEQ ID NO: 34444 - protein, 5 aa, synthetic construct
  source 1..5: note = Description of Artificial Sequence: Synthetic peptide; note = XENP024229 vhCDR1
HYGMN

SEQ ID NO: 34445 - protein, 17 aa, synthetic construct
  source 1..17: note = Description of Artificial Sequence: Synthetic peptide; note = XENP024229 vhCDR2
WINTYTGEPTYADGFTG

SEQ ID NO: 34446 - protein, 8 aa, synthetic construct
  source 1..8: note = Description of Artificial Sequence: Synthetic peptide; note = XENP024229 vhCDR3
DYYGSSPY

SEQ ID NO: 34447 - protein, 16 aa, synthetic construct
  source 1..16: note = Description of Artificial Sequence: Synthetic peptide; note = XENP024229 vlCDR1
KSSQSIVHSNGNTYLE

SEQ ID NO: 34448 - protein, 7 aa, synthetic construct
  source 1..7: note = Description of Artificial Sequence: Synthetic peptide; note = XENP024229 vlCDR2
KVSNRFS

SEQ ID NO: 34449 - protein, 9 aa, synthetic construct
  source 1..9: note = Description of Artificial Sequence: Synthetic peptide; note = XENP024229 vlCDR3
FQGSHVPNT

SEQ ID NO: 34450 - protein, 251 aa, synthetic construct
  source 1..251: note = Description of Artificial Sequence: Synthetic polypeptide; note = XENP024230 1C11_H3.99_L3_scFv
QIQLVQSGSELKKPGATVKVSCKASGYTFTHYGMNWVRQAPGQGLEWMGWINTYTGEPTYADGFTGRFVFSLDTSVSTAYLQISSLKAEDTAVYFCARDYYGSSPYWGQGTLVTVSSGKPGSGKPGSGKPGSGKPGSDVLMTQSPDSLAVSLGERATINCKSSQSIVHSNGNTYLEWYQQKPGQSPKLLIYKVSNRFSGVPDRFSGSGSGTDFTLTISSLQAEDVAVYYCFQGSHVPNTFGGGTKVEIKGS

SEQ ID NO: 34451 - protein, 117 aa, synthetic construct
  source 1..117: note = Description of Artificial Sequence: Synthetic polypeptide; note = VH of XENP024230
QIQLVQSGSELKKPGATVKVSCKASGYTFTHYGMNWVRQAPGQGLEWMGWINTYTGEPTYADGFTGRFVFSLDTSVSTAYLQISSLKAEDTAVYFCARDYYGSSPYWGQGTLVTVSS

SEQ ID NO: 34452 - protein, 114 aa, synthetic construct; identical to SEQ ID NO: 33651
  source 1..114: note = Description of Artificial Sequence: Synthetic polypeptide; note = VL of XENP024230

SEQ ID NO: 34453 - protein, 5 aa, synthetic construct
  source 1..5: note = Description of Artificial Sequence: Synthetic peptide; note = XENP024230 vhCDR1
HYGMN

SEQ ID NO: 34454 - protein, 17 aa, synthetic construct
  source 1..17: note = Description of Artificial Sequence: Synthetic peptide; note = XENP024230 vhCDR2
WINTYTGEPTYADGFTG

SEQ ID NO: 34455 - protein, 8 aa, synthetic construct
  source 1..8: note = Description of Artificial Sequence: Synthetic peptide; note = XENP024230 vhCDR3
DYYGSSPY

SEQ ID NO: 34456 - protein, 16 aa, synthetic construct
  source 1..16: note = Description of Artificial Sequence: Synthetic peptide; note = XENP024230 vlCDR1
KSSQSIVHSNGNTYLE

SEQ ID NO: 34457 - protein, 7 aa, synthetic construct
  source 1..7: note = Description of Artificial Sequence: Synthetic peptide; note = XENP024230 vlCDR2
KVSNRFS

SEQ ID NO: 34458 - protein, 9 aa, synthetic construct
  source 1..9: note = Description of Artificial Sequence: Synthetic peptide; note = XENP024230 vlCDR3
FQGSHVPNT

SEQ ID NO: 34459 - protein, 251 aa, synthetic construct
  source 1..251: note = Description of Artificial Sequence: Synthetic polypeptide; note = XENP024231 1C11_H3.100_L3_scFv
QIQLVQSGSELKKPGASLKVSCKASGYTFTHYGMNWVRQAPGQGLEWMGWINTYTGEPTYADGFTGRFVFSLDTSVSTAYLQISSLKAEDTAVYFCARDYYGSSPYWGQGTLVTVSSGKPGSGKPGSGKPGSGKPGSDVLMTQSPDSLAVSLGERATINCKSSQSIVHSNGNTYLEWYQQKPGQSPKLLIYKVSNRFSGVPDRFSGSGSGTDFTLTISSLQAEDVAVYYCFQGSHVPNTFGGGTKVEIKGS

SEQ ID NO: 34460 - protein, 117 aa, synthetic construct
  source 1..117: note = Description of Artificial Sequence: Synthetic polypeptide; note = VH of XENP024231
QIQLVQSGSELKKPGASLKVSCKASGYTFTHYGMNWVRQAPGQGLEWMGWINTYTGEPTYADGFTGRFVFSLDTSVSTAYLQISSLKAEDTAVYFCARDYYGSSPYWGQGTLVTVSS

SEQ ID NO: 34461 - protein, 114 aa, synthetic construct; identical to SEQ ID NO: 33651
  source 1..114: note = Description of Artificial Sequence: Synthetic polypeptide; note = VL of XENP024231

SEQ ID NO: 34462 - protein, 5 aa, synthetic construct
  source 1..5: note = Description of Artificial Sequence: Synthetic peptide; note = XENP024231 vhCDR1
HYGMN

SEQ ID NO: 34463 - protein, 17 aa, synthetic construct
  source 1..17: note = Description of Artificial Sequence: Synthetic peptide; note = XENP024231 vhCDR2
WINTYTGEPTYADGFTG

SEQ ID NO: 34464 - protein, 8 aa, synthetic construct
  source 1..8: note = Description of Artificial Sequence: Synthetic peptide; note = XENP024231 vhCDR3
DYYGSSPY

SEQ ID NO: 34465 - protein, 16 aa, synthetic construct
  source 1..16: note = Description of Artificial Sequence: Synthetic peptide; note = XENP024231 vlCDR1
KSSQSIVHSNGNTYLE

SEQ ID NO: 34466 - protein, 7 aa, synthetic construct
  source 1..7: note = Description of Artificial Sequence: Synthetic peptide; note = XENP024231 vlCDR2
KVSNRFS

SEQ ID NO: 34467 - protein, 9 aa, synthetic construct
  source 1..9: note = Description of Artificial Sequence: Synthetic peptide; note = XENP024231 vlCDR3
FQGSHVPNT

SEQ ID NO: 34468 - protein, 251 aa, synthetic construct
  source 1..251: note = Description of Artificial Sequence: Synthetic polypeptide; note = XENP024232 1C11_H3.101_L3_scFv
QIQLVQSGSELKKPGASVRVSCKASGYTFTHYGMNWVRQAPGQGLEWMGWINTYTGEPTYADGFTGRFVFSLDTSVSTAYLQISSLKAEDTAVYFCARDYYGSSPYWGQGTLVTVSSGKPGSGKPGSGKPGSGKPGSDVLMTQSPDSLAVSLGERATINCKSSQSIVHSNGNTYLEWYQQKPGQSPKLLIYKVSNRFSGVPDRFSGSGSGTDFTLTISSLQAEDVAVYYCFQGSHVPNTFGGGTKVEIKGS

SEQ ID NO: 34469 - protein, 117 aa, synthetic construct
  source 1..117: note = Description of Artificial Sequence: Synthetic polypeptide; note = VH of XENP024232
QIQLVQSGSELKKPGASVRVSCKASGYTFTHYGMNWVRQAPGQGLEWMGWINTYTGEPTYADGFTGRFVFSLDTSVSTAYLQISSLKAEDTAVYFCARDYYGSSPYWGQGTLVTVSS

SEQ ID NO: 34470 - protein, 114 aa, synthetic construct; identical to SEQ ID NO: 33651
  source 1..114: note = Description of Artificial Sequence: Synthetic polypeptide; note = VL of XENP024232

SEQ ID NO: 34471 - protein, 5 aa, synthetic construct
  source 1..5: note = Description of Artificial Sequence: Synthetic peptide; note = XENP024232 vhCDR1
HYGMN

SEQ ID NO: 34472 - protein, 17 aa, synthetic construct
  source 1..17: note = Description of Artificial Sequence: Synthetic peptide; note = XENP024232 vhCDR2
WINTYTGEPTYADGFTG

SEQ ID NO: 34473 - protein, 8 aa, synthetic construct
  source 1..8: note = Description of Artificial Sequence: Synthetic peptide; note = XENP024232 vhCDR3
DYYGSSPY

SEQ ID NO: 34474 - protein, 16 aa, synthetic construct
  source 1..16: note = Description of Artificial Sequence: Synthetic peptide; note = XENP024232 vlCDR1
KSSQSIVHSNGNTYLE

SEQ ID NO: 34475 - protein, 7 aa, synthetic construct
  source 1..7: note = Description of Artificial Sequence: Synthetic peptide; note = XENP024232 vlCDR2
KVSNRFS

SEQ ID NO: 34476 - protein, 9 aa, synthetic construct
  source 1..9: note = Description of Artificial Sequence: Synthetic peptide; note = XENP024232 vlCDR3
FQGSHVPNT

SEQ ID NO: 34477 - protein, 251 aa, synthetic construct
  source 1..251: note = Description of Artificial Sequence: Synthetic polypeptide; note = XENP024233 1C11_H3.102_L3_scFv
QIQLVQSGSELKKPGASVSVSCKASGYTFTHYGMNWVRQAPGQGLEWMGWINTYTGEPTYADGFTGRFVFSLDTSVSTAYLQISSLKAEDTAVYFCARDYYGSSPYWGQGTLVTVSSGKPGSGKPGSGKPGSGKPGSDVLMTQSPDSLAVSLGERATINCKSSQSIVHSNGNTYLEWYQQKPGQSPKLLIYKVSNRFSGVPDRFSGSGSGTDFTLTISSLQAEDVAVYYCFQGSHVPNTFGGGTKVEIKGS

SEQ ID NO: 34478 - protein, 117 aa, synthetic construct
  source 1..117: note = Description of Artificial Sequence: Synthetic polypeptide; note = VH of XENP024233
QIQLVQSGSELKKPGASVSVSCKASGYTFTHYGMNWVRQAPGQGLEWMGWINTYTGEPTYADGFTGRFVFSLDTSVSTAYLQISSLKAEDTAVYFCARDYYGSSPYWGQGTLVTVSS

SEQ ID NO: 34479 - protein, 114 aa, synthetic construct; identical to SEQ ID NO: 33651
  source 1..114: note = Description of Artificial Sequence: Synthetic polypeptide; note = VL of XENP024233

SEQ ID NO: 34480 - protein, 5 aa, synthetic construct
  source 1..5: note = Description of Artificial Sequence: Synthetic peptide; note = XENP024233 vhCDR1
HYGMN

SEQ ID NO: 34481 - protein, 17 aa, synthetic construct
  source 1..17: note = Description of Artificial Sequence: Synthetic peptide; note = XENP024233 vhCDR2
WINTYTGEPTYADGFTG

SEQ ID NO: 34482 - protein, 8 aa, synthetic construct
  source 1..8: note = Description of Artificial Sequence: Synthetic peptide; note = XENP024233 vhCDR3
DYYGSSPY

SEQ ID NO: 34483 - protein, 16 aa, synthetic construct
  source 1..16: note = Description of Artificial Sequence: Synthetic peptide; note = XENP024233 vlCDR1
KSSQSIVHSNGNTYLE

SEQ ID NO: 34484 - protein, 7 aa, synthetic construct
  source 1..7: note = Description of Artificial Sequence: Synthetic peptide; note = XENP024233 vlCDR2
KVSNRFS

SEQ ID NO: 34485 - protein, 9 aa, synthetic construct
  source 1..9: note = Description of Artificial Sequence: Synthetic peptide; note = XENP024233 vlCDR3
FQGSHVPNT

SEQ ID NO: 34486 - protein, 251 aa, synthetic construct
  source 1..251: note = Description of Artificial Sequence: Synthetic polypeptide; note = XENP024234 1C11_H3.103_L3_scFv
QIQLVQSGSELKKPGASVKVTCKASGYTFTHYGMNWVRQAPGQGLEWMGWINTYTGEPTYADGFTGRFVFSLDTSVSTAYLQISSLKAEDTAVYFCARDYYGSSPYWGQGTLVTVSSGKPGSGKPGSGKPGSGKPGSDVLMTQSPDSLAVSLGERATINCKSSQSIVHSNGNTYLEWYQQKPGQSPKLLIYKVSNRFSGVPDRFSGSGSGTDFTLTISSLQAEDVAVYYCFQGSHVPNTFGGGTKVEIKGS

SEQ ID NO: 34487 - protein, 117 aa, synthetic construct
  source 1..117: note = Description of Artificial Sequence: Synthetic polypeptide; note = VH of XENP024234
QIQLVQSGSELKKPGASVKVTCKASGYTFTHYGMNWVRQAPGQGLEWMGWINTYTGEPTYADGFTGRFVFSLDTSVSTAYLQISSLKAEDTAVYFCARDYYGSSPYWGQGTLVTVSS

SEQ ID NO: 34488 - protein, 114 aa, synthetic construct; identical to SEQ ID NO: 33651
  source 1..114: note = Description of Artificial Sequence: Synthetic polypeptide; note = VL of XENP024234

SEQ ID NO: 34489 - protein, 5 aa, synthetic construct
  source 1..5: note = Description of Artificial Sequence: Synthetic peptide; note = XENP024234 vhCDR1
HYGMN

SEQ ID NO: 34490 - protein, 17 aa, synthetic construct
  source 1..17: note = Description of Artificial Sequence: Synthetic peptide; note = XENP024234 vhCDR2
WINTYTGEPTYADGFTG

SEQ ID NO: 34491 - protein, 8 aa, synthetic construct
  source 1..8: note = Description of Artificial Sequence: Synthetic peptide; note = XENP024234 vhCDR3
DYYGSSPY

SEQ ID NO: 34492 - protein, 16 aa, synthetic construct
  source 1..16: note = Description of Artificial Sequence: Synthetic peptide; note = XENP024234 vlCDR1
KSSQSIVHSNGNTYLE

SEQ ID NO: 34493 - protein, 7 aa, synthetic construct
  source 1..7: note = Description of Artificial Sequence: Synthetic peptide; note = XENP024234 vlCDR2
KVSNRFS

SEQ ID NO: 34494 - protein, 9 aa, synthetic construct
  source 1..9: note = Description of Artificial Sequence: Synthetic peptide; note = XENP024234 vlCDR3
FQGSHVPNT

SEQ ID NO: 34495 - protein, 251 aa, synthetic construct
  source 1..251: note = Description of Artificial Sequence: Synthetic polypeptide; note = XENP024235 1C11_H3.104_L3_scFv
QIQLVQSGSELKKPGASVKVSCAASGYTFTHYGMNWVRQAPGQGLEWMGWINTYTGEPTYADGFTGRFVFSLDTSVSTAYLQISSLKAEDTAVYFCARDYYGSSPYWGQGTLVTVSSGKPGSGKPGSGKPGSGKPGSDVLMTQSPDSLAVSLGERATINCKSSQSIVHSNGNTYLEWYQQKPGQSPKLLIYKVSNRFSGVPDRFSGSGSGTDFTLTISSLQAEDVAVYYCFQGSHVPNTFGGGTKVEIKGS

SEQ ID NO: 34496 - protein, 117 aa, synthetic construct
  source 1..117: note = Description of Artificial Sequence: Synthetic polypeptide; note = VH of XENP024235
QIQLVQSGSELKKPGASVKVSCAASGYTFTHYGMNWVRQAPGQGLEWMGWINTYTGEPTYADGFTGRFVFSLDTSVSTAYLQISSLKAEDTAVYFCARDYYGSSPYWGQGTLVTVSS

SEQ ID NO: 34497 - protein, 114 aa, synthetic construct; identical to SEQ ID NO: 33651
  source 1..114: note = Description of Artificial Sequence: Synthetic polypeptide; note = VL of XENP024235

SEQ ID NO: 34498 - protein, 5 aa, synthetic construct
  source 1..5: note = Description of Artificial Sequence: Synthetic peptide; note = XENP024235 vhCDR1
HYGMN

SEQ ID NO: 34499 - protein, 17 aa, synthetic construct
  source 1..17: note = Description of Artificial Sequence: Synthetic peptide; note = XENP024235 vhCDR2
WINTYTGEPTYADGFTG

SEQ ID NO: 34500 - protein, 8 aa, synthetic construct
  source 1..8: note = Description of Artificial Sequence: Synthetic peptide; note = XENP024235 vhCDR3
DYYGSSPY

SEQ ID NO: 34501 - protein, 16 aa, synthetic construct
  source 1..16: note = Description of Artificial Sequence: Synthetic peptide; note = XENP024235 vlCDR1
KSSQSIVHSNGNTYLE

SEQ ID NO: 34502 - protein, 7 aa, synthetic construct
  source 1..7: note = Description of Artificial Sequence: Synthetic peptide; note = XENP024235 vlCDR2
KVSNRFS

SEQ ID NO: 34503 - protein, 9 aa, synthetic construct
  source 1..9: note = Description of Artificial Sequence: Synthetic peptide; note = XENP024235 vlCDR3
FQGSHVPNT

SEQ ID NO: 34504 - protein, 251 aa, synthetic construct
  source 1..251: note = Description of Artificial Sequence: Synthetic polypeptide; note = XENP024236 1C11_H3.105_L3_scFv
QIQLVQSGSELKKPGASVKVSCTASGYTFTHYGMNWVRQAPGQGLEWMGWINTYTGEPTYADGFTGRFVFSLDTSVSTAYLQISSLKAEDTAVYFCARDYYGSSPYWGQGTLVTVSSGKPGSGKPGSGKPGSGKPGSDVLMTQSPDSLAVSLGERATINCKSSQSIVHSNGNTYLEWYQQKPGQSPKLLIYKVSNRFSGVPDRFSGSGSGTDFTLTISSLQAEDVAVYYCFQGSHVPNTFGGGTKVEIKGS

SEQ ID NO: 34505 - protein, 117 aa, synthetic construct
  source 1..117: note = Description of Artificial Sequence: Synthetic polypeptide; note = VH of XENP024236
QIQLVQSGSELKKPGASVKVSCTASGYTFTHYGMNWVRQAPGQGLEWMGWINTYTGEPTYADGFTGRFVFSLDTSVSTAYLQISSLKAEDTAVYFCARDYYGSSPYWGQGTLVTVSS

SEQ ID NO: 34506 - protein, 114 aa, synthetic construct; identical to SEQ ID NO: 33651
  source 1..114: note = Description of Artificial Sequence: Synthetic polypeptide; note = VL of XENP024236

SEQ ID NO: 34507 - protein, 5 aa, synthetic construct
  source 1..5: note = Description of Artificial Sequence: Synthetic peptide; note = XENP024236 vhCDR1
HYGMN

SEQ ID NO: 34508 - protein, 17 aa, synthetic construct
  source 1..17: note = Description of Artificial Sequence: Synthetic peptide; note = XENP024236 vhCDR2
WINTYTGEPTYADGFTG

SEQ ID NO: 34509 - protein, 8 aa, synthetic construct
  source 1..8: note = Description of Artificial Sequence: Synthetic peptide; note = XENP024236 vhCDR3
DYYGSSPY

SEQ ID NO: 34510 - protein, 16 aa, synthetic construct
  source 1..16: note = Description of Artificial Sequence: Synthetic peptide; note = XENP024236 vlCDR1
KSSQSIVHSNGNTYLE

SEQ ID NO: 34511 - protein, 7 aa, synthetic construct
  source 1..7: note = Description of Artificial Sequence: Synthetic peptide; note = XENP024236 vlCDR2
KVSNRFS

SEQ ID NO: 34512 - protein, 9 aa, synthetic construct
  source 1..9: note = Description of Artificial Sequence: Synthetic peptide; note = XENP024236 vlCDR3
FQGSHVPNT

SEQ ID NO: 34513 - protein, 251 aa, synthetic construct
  source 1..251: note = Description of Artificial Sequence: Synthetic polypeptide; note = XENP024237 1C11_H3.106_L3_scFv
QIQLVQSGSELKKPGASVKVSCKVSGYTFTHYGMNWVRQAPGQGLEWMGWINTYTGEPTYADGFTGRFVFSLDTSVSTAYLQISSLKAEDTAVYFCARDYYGSSPYWGQGTLVTVSSGKPGSGKPGSGKPGSGKPGSDVLMTQSPDSLAVSLGERATINCKSSQSIVHSNGNTYLEWYQQKPGQSPKLLIYKVSNRFSGVPDRFSGSGSGTDFTLTISSLQAEDVAVYYCFQGSHVPNTFGGGTKVEIKGS

SEQ ID NO: 34514 - protein, 117 aa, synthetic construct
  source 1..117: note = Description of Artificial Sequence: Synthetic polypeptide; note = VH of XENP024237
QIQLVQSGSELKKPGASVKVSCKVSGYTFTHYGMNWVRQAPGQGLEWMGWINTYTGEPTYADGFTGRFVFSLDTSVSTAYLQISSLKAEDTAVYFCARDYYGSSPYWGQGTLVTVSS

SEQ ID NO: 34515 - protein, 114 aa, synthetic construct; identical to SEQ ID NO: 33651
  source 1..114: note = Description of Artificial Sequence: Synthetic polypeptide; note = VL of XENP024237

SEQ ID NO: 34516 - protein, 5 aa, synthetic construct
  source 1..5: note = Description of Artificial Sequence: Synthetic peptide; note = XENP024237 vhCDR1
HYGMN

SEQ ID NO: 34517 - protein, 17 aa, synthetic construct
  source 1..17: note = Description of Artificial Sequence: Synthetic peptide; note = XENP024237 vhCDR2
WINTYTGEPTYADGFTG

SEQ ID NO: 34518 - protein, 8 aa, synthetic construct
  source 1..8: note = Description of Artificial Sequence: Synthetic peptide; note = XENP024237 vhCDR3
DYYGSSPY

SEQ ID NO: 34519 - protein, 16 aa, synthetic construct
  source 1..16: note = Description of Artificial Sequence: Synthetic peptide; note = XENP024237 vlCDR1
KSSQSIVHSNGNTYLE

SEQ ID NO: 34520 - protein, 7 aa, synthetic construct
  source 1..7: note = Description of Artificial Sequence: Synthetic peptide; note = XENP024237 vlCDR2
KVSNRFS

SEQ ID NO: 34521 - protein, 9 aa, synthetic construct
  source 1..9: note = Description of Artificial Sequence: Synthetic peptide; note = XENP024237 vlCDR3
FQGSHVPNT

SEQ ID NO: 34522 - protein, 251 aa, synthetic construct
  source 1..251: note = Description of Artificial Sequence: Synthetic polypeptide; note = XENP024238 1C11_H3.107_L3_scFv
QIQLVQSGSELKKPGASVKVSCKGSGYTFTHYGMNWVRQAPGQGLEWMGWINTYTGEPTYADGFTGRFVFSLDTSVSTAYLQISSLKAEDTAVYFCARDYYGSSPYWGQGTLVTVSSGKPGSGKPGSGKPGSGKPGSDVLMTQSPDSLAVSLGERATINCKSSQSIVHSNGNTYLEWYQQKPGQSPKLLIYKVSNRFSGVPDRFSGSGSGTDFTLTISSLQAEDVAVYYCFQGSHVPNTFGGGTKVEIKGS

SEQ ID NO: 34523 - protein, 117 aa, synthetic construct
  source 1..117: note = Description of Artificial Sequence: Synthetic polypeptide; note = VH of XENP024238
QIQLVQSGSELKKPGASVKVSCKGSGYTFTHYGMNWVRQAPGQGLEWMGWINTYTGEPTYADGFTGRFVFSLDTSVSTAYLQISSLKAEDTAVYFCARDYYGSSPYWGQGTLVTVSS

SEQ ID NO: 34524 - protein, 114 aa, synthetic construct; identical to SEQ ID NO: 33651
  source 1..114: note = Description of Artificial Sequence: Synthetic polypeptide; note = VL of XENP024238

SEQ ID NO: 34525 - protein, 5 aa, synthetic construct
  source 1..5: note = Description of Artificial Sequence: Synthetic peptide; note = XENP024238 vhCDR1
HYGMN

SEQ ID NO: 34526 - protein, 17 aa, synthetic construct
  source 1..17: note = Description of Artificial Sequence: Synthetic peptide; note = XENP024238 vhCDR2
WINTYTGEPTYADGFTG

SEQ ID NO: 34527 - protein, 8 aa, synthetic construct
  source 1..8: note = Description of Artificial Sequence: Synthetic peptide; note = XENP024238 vhCDR3
DYYGSSPY

SEQ ID NO: 34528 - protein, 16 aa, synthetic construct
  source 1..16: note = Description of Artificial Sequence: Synthetic peptide; note = XENP024238 vlCDR1
KSSQSIVHSNGNTYLE

SEQ ID NO: 34529 - protein, 7 aa, synthetic construct
  source 1..7: note = Description of Artificial Sequence: Synthetic peptide; note = XENP024238 vlCDR2
KVSNRFS

SEQ ID NO: 34530 - protein, 9 aa, synthetic construct
  source 1..9: note = Description of Artificial Sequence: Synthetic peptide; note = XENP024238 vlCDR3
FQGSHVPNT

SEQ ID NO: 34531 - protein, 251 aa, synthetic construct
  source 1..251: note = Description of Artificial Sequence: Synthetic polypeptide; note = XENP024239 1C11_H3.109_L3_scFv
QIQLVQSGSELKKPGASVKVSCKASGFTFTHYGMNWVRQAPGQGLEWMGWINTYTGEPTYADGFTGRFVFSLDTSVSTAYLQISSLKAEDTAVYFCARDYYGSSPYWGQGTLVTVSSGKPGSGKPGSGKPGSGKPGSDVLMTQSPDSLAVSLGERATINCKSSQSIVHSNGNTYLEWYQQKPGQSPKLLIYKVSNRFSGVPDRFSGSGSGTDFTLTISSLQAEDVAVYYCFQGSHVPNTFGGGTKVEIKGS

SEQ ID NO: 34532 - protein, 117 aa, synthetic construct
  source 1..117: note = Description of Artificial Sequence: Synthetic polypeptide; note = VH of XENP024239
QIQLVQSGSELKKPGASVKVSCKASGFTFTHYGMNWVRQAPGQGLEWMGWINTYTGEPTYADGFTGRFVFSLDTSVSTAYLQISSLKAEDTAVYFCARDYYGSSPYWGQGTLVTVSS

SEQ ID NO: 34533 - protein, 114 aa, synthetic construct; identical to SEQ ID NO: 33651
  source 1..114: note = Description of Artificial Sequence: Synthetic polypeptide; note = VL of XENP024239

SEQ ID NO: 34534 - protein, 5 aa, synthetic construct
  source 1..5: note = Description of Artificial Sequence: Synthetic peptide; note = XENP024239 vhCDR1
HYGMN

SEQ ID NO: 34535 - protein, 17 aa, synthetic construct
  source 1..17: note = Description of Artificial Sequence: Synthetic peptide; note = XENP024239 vhCDR2
WINTYTGEPTYADGFTG

SEQ ID NO: 34536 - protein, 8 aa, synthetic construct
  source 1..8: note = Description of Artificial Sequence: Synthetic peptide; note = XENP024239 vhCDR3
DYYGSSPY

SEQ ID NO: 34537 - protein, 16 aa, synthetic construct
  source 1..16: note = Description of Artificial Sequence: Synthetic peptide; note = XENP024239 vlCDR1
KSSQSIVHSNGNTYLE

SEQ ID NO: 34538 - protein, 7 aa, synthetic construct
  source 1..7: note = Description of Artificial Sequence: Synthetic peptide; note = XENP024239 vlCDR2
KVSNRFS

SEQ ID NO: 34539 - protein, 9 aa, synthetic construct
  source 1..9: note = Description of Artificial Sequence: Synthetic peptide; note = XENP024239 vlCDR3
FQGSHVPNT

SEQ ID NO: 34540 - protein, 251 aa, synthetic construct
  source 1..251: note = Description of Artificial Sequence: Synthetic polypeptide; note = XENP024240 1C11_H3.110_L3_scFv
QIQLVQSGSELKKPGASVKVSCKASGGTFTHYGMNWVRQAPGQGLEWMGWINTYTGEPTYADGFTGRFVFSLDTSVSTAYLQISSLKAEDTAVYFCARDYYGSSPYWGQGTLVTVSSGKPGSGKPGSGKPGSGKPGSDVLMTQSPDSLAVSLGERATINCKSSQSIVHSNGNTYLEWYQQKPGQSPKLLIYKVSNRFSGVPDRFSGSGSGTDFTLTISSLQAEDVAVYYCFQGSHVPNTFGGGTKVEIKGS

SEQ ID NO: 34541 - protein, 117 aa, synthetic construct
  source 1..117: note = Description of Artificial Sequence: Synthetic polypeptide; note = VH of XENP024240
QIQLVQSGSELKKPGASVKVSCKASGGTFTHYGMNWVRQAPGQGLEWMGWINTYTGEPTYADGFTGRFVFSLDTSVSTAYLQISSLKAEDTAVYFCARDYYGSSPYWGQGTLVTVSS

SEQ ID NO: 34542 - protein, 114 aa, synthetic construct; identical to SEQ ID NO: 33651
  source 1..114: note = Description of Artificial Sequence: Synthetic polypeptide; note = VL of XENP024240

SEQ ID NO: 34543 - protein, 5 aa, synthetic construct
  source 1..5: note = Description of Artificial Sequence: Synthetic peptide; note = XENP024240 vhCDR1
HYGMN

SEQ ID NO: 34544 - protein, 17 aa, synthetic construct
  source 1..17: note = Description of Artificial Sequence: Synthetic peptide; note = XENP024240 vhCDR2
WINTYTGEPTYADGFTG

SEQ ID NO: 34545 - protein, 8 aa, synthetic construct
  source 1..8: note = Description of Artificial Sequence: Synthetic peptide; note = XENP024240 vhCDR3
DYYGSSPY

SEQ ID NO: 34546 - protein, 16 aa, synthetic construct
  source 1..16: note = Description of Artificial Sequence: Synthetic peptide; note = XENP024240 vlCDR1
KSSQSIVHSNGNTYLE

SEQ ID NO: 34547 - protein, 7 aa, synthetic construct
  source 1..7: note = Description of Artificial Sequence: Synthetic peptide; note = XENP024240 vlCDR2
KVSNRFS

SEQ ID NO: 34548 - protein, 9 aa, synthetic construct
  source 1..9: note = Description of Artificial Sequence: Synthetic peptide; note = XENP024240 vlCDR3
FQGSHVPNT

SEQ ID NO: 34549 - protein, 251 aa, synthetic construct
  source 1..251: note = Description of Artificial Sequence: Synthetic polypeptide; note = XENP024241 1C11_H3.111_L3_scFv
QIQLVQSGSELKKPGASVKVSCKASGYSFTHYGMNWVRQAPGQGLEWMGWINTYTGEPTYADGFTGRFVFSLDTSVSTAYLQISSLKAEDTAVYFCARDYYGSSPYWGQGTLVTVSSGKPGSGKPGSGKPGSGKPGSDVLMTQSPDSLAVSLGERATINCKSSQSIVHSNGNTYLEWYQQKPGQSPKLLIYKVSNRFSGVPDRFSGSGSGTDFTLTISSLQAEDVAVYYCFQGSHVPNTFGGGTKVEIKGS

SEQ ID NO: 34550 - protein, 117 aa, synthetic construct
  source 1..117: note = Description of Artificial Sequence: Synthetic polypeptide; note = VH of XENP024241
QIQLVQSGSELKKPGASVKVSCKASGYSFTHYGMNWVRQAPGQGLEWMGWINTYTGEPTYADGFTGRFVFSLDTSVSTAYLQISSLKAEDTAVYFCARDYYGSSPYWGQGTLVTVSS

SEQ ID NO: 34551 - protein, 114 aa, synthetic construct; identical to SEQ ID NO: 33651
  source 1..114: note = Description of Artificial Sequence: Synthetic polypeptide; note = VL of XENP024241

SEQ ID NO: 34552 - protein, 5 aa, synthetic construct
  source 1..5: note = Description of Artificial Sequence: Synthetic peptide; note = XENP024241 vhCDR1
HYGMN

SEQ ID NO: 34553 - protein, 17 aa, synthetic construct
  source 1..17: note = Description of Artificial Sequence: Synthetic peptide; note = XENP024241 vhCDR2
WINTYTGEPTYADGFTG

SEQ ID NO: 34554 - protein, 8 aa, synthetic construct
  source 1..8: note = Description of Artificial Sequence: Synthetic peptide; note = XENP024241 vhCDR3
DYYGSSPY

SEQ ID NO: 34555 - protein, 16 aa, synthetic construct
  source 1..16: note = Description of Artificial Sequence: Synthetic peptide; note = XENP024241 vlCDR1
KSSQSIVHSNGNTYLE

SEQ ID NO: 34556 - protein, 7 aa, synthetic construct
  source 1..7: note = Description of Artificial Sequence: Synthetic peptide; note = XENP024241 vlCDR2
KVSNRFS

SEQ ID NO: 34557 - protein, 9 aa, synthetic construct
  source 1..9: note = Description of Artificial Sequence: Synthetic peptide; note = XENP024241 vlCDR3
FQGSHVPNT

SEQ ID NO: 34558 - protein, 251 aa, synthetic construct
  source 1..251: note = Description of Artificial Sequence: Synthetic polypeptide; note = XENP024242 1C11_H3.113_L3_scFv
QIQLVQSGSELKKPGASVKVSCKASGYTITHYGMNWVRQAPGQGLEWMGWINTYTGEPTYADGFTGRFVFSLDTSVSTAYLQISSLKAEDTAVYFCARDYYGSSPYWGQGTLVTVSSGKPGSGKPGSGKPGSGKPGSDVLMTQSPDSLAVSLGERATINCKSSQSIVHSNGNTYLEWYQQKPGQSPKLLIYKVSNRFSGVPDRFSGSGSGTDFTLTISSLQAEDVAVYYCFQGSHVPNTFGGGTKVEIKGS

SEQ ID NO: 34559 - protein, 117 aa, synthetic construct
  source 1..117: note = Description of Artificial Sequence: Synthetic polypeptide; note = VH of XENP024242
QIQLVQSGSELKKPGASVKVSCKASGYTITHYGMNWVRQAPGQGLEWMGWINTYTGEPTYADGFTGRFVFSLDTSVSTAYLQISSLKAEDTAVYFCARDYYGSSPYWGQGTLVTVSS

SEQ ID NO: 34560 - protein, 114 aa, synthetic construct; identical to SEQ ID NO: 33651
  source 1..114: note = Description of Artificial Sequence: Synthetic polypeptide; note = VL of XENP024242

SEQ ID NO: 34561 - protein, 5 aa, synthetic construct
  source 1..5: note = Description of Artificial Sequence: Synthetic peptide; note = XENP024242 vhCDR1
HYGMN

SEQ ID NO: 34562 - protein, 17 aa, synthetic construct
  source 1..17: note = Description of Artificial Sequence: Synthetic peptide; note = XENP024242 vhCDR2
WINTYTGEPTYADGFTG

SEQ ID NO: 34563 - protein, 8 aa, synthetic construct
  source 1..8: note = Description of Artificial Sequence: Synthetic peptide; note = XENP024242 vhCDR3
DYYGSSPY

SEQ ID NO: 34564 - protein, 16 aa, synthetic construct
  source 1..16: note = Description of Artificial Sequence: Synthetic peptide; note = XENP024242 vlCDR1
KSSQSIVHSNGNTYLE

SEQ ID NO: 34565 - protein, 7 aa, synthetic construct
  source 1..7: note = Description of Artificial Sequence: Synthetic peptide; note = XENP024242 vlCDR2
KVSNRFS

SEQ ID NO: 34566 - protein, 9 aa, synthetic construct
  source 1..9: note = Description of Artificial Sequence: Synthetic peptide; note = XENP024242 vlCDR3
FQGSHVPNT

SEQ ID NO: 34567 - protein, 251 aa, synthetic construct
  source 1..251: note = Description of Artificial Sequence: Synthetic polypeptide; note = XENP024243 1C11_H3.114_L3_scFv
QIQLVQSGSELKKPGASVKVSCKASGYTVTHYGMNWVRQAPGQGLEWMGWINTYTGEPTYADGFTGRFVFSLDTSVSTAYLQISSLKAEDTAVYFCARDYYGSSPYWGQGTLVTVSSGKPGSGKPGSGKPGSGKPGSDVLMTQSPDSLAVSLGERATINCKSSQSIVHSNGNTYLEWYQQKPGQSPKLLIYKVSNRFSGVPDRFSGSGSGTDFTLTISSLQAEDVAVYYCFQGSHVPNTFGGGTKVEIKGS

SEQ ID NO: 34568 - protein, 117 aa, synthetic construct
  source 1..117: note = Description of Artificial Sequence: Synthetic polypeptide; note = VH of XENP024243
QIQLVQSGSELKKPGASVKVSCKASGYTVTHYGMNWVRQAPGQGLEWMGWINTYTGEPTYADGFTGRFVFSLDTSVSTAYLQISSLKAEDTAVYFCARDYYGSSPYWGQGTLVTVSS

SEQ ID NO: 34569 - protein, 114 aa, synthetic construct; identical to SEQ ID NO: 33651
  source 1..114: note = Description of Artificial Sequence: Synthetic polypeptide; note = VL of XENP024243

SEQ ID NO: 34570 - protein, 5 aa, synthetic construct
  source 1..5: note = Description of Artificial Sequence: Synthetic peptide; note = XENP024243 vhCDR1
HYGMN

SEQ ID NO: 34571 - protein, 17 aa, synthetic construct
  source 1..17: note = Description of Artificial Sequence: Synthetic peptide; note = XENP024243 vhCDR2
WINTYTGEPTYADGFTG

SEQ ID NO: 34572 - protein, 8 aa, synthetic construct
  source 1..8: note = Description of Artificial Sequence: Synthetic peptide; note = XENP024243 vhCDR3
DYYGSSPY

SEQ ID NO: 34573 - protein, 16 aa, synthetic construct
  source 1..16: note = Description of Artificial Sequence: Synthetic peptide; note = XENP024243 vlCDR1
KSSQSIVHSNGNTYLE

SEQ ID NO: 34574 - protein, 7 aa, synthetic construct
  source 1..7: note = Description of Artificial Sequence: Synthetic peptide; note = XENP024243 vlCDR2
KVSNRFS

SEQ ID NO: 34575 - protein, 9 aa, synthetic construct
  source 1..9: note = Description of Artificial Sequence: Synthetic peptide; note = XENP024243 vlCDR3
FQGSHVPNT

SEQ ID NO: 34576 - protein, 251 aa, synthetic construct
  source 1..251: note = Description of Artificial Sequence: Synthetic polypeptide; note = XENP024244 1C11_H3.115_L3_scFv
QIQLVQSGSELKKPGASVKVSCKASGYTFSHYGMNWVRQAPGQGLEWMGWINTYTGEPTYADGFTGRFVFSLDTSVSTAYLQISSLKAEDTAVYFCARDYYGSSPYWGQGTLVTVSSGKPGSGKPGSGKPGSGKPGSDVLMTQSPDSLAVSLGERATINCKSSQSIVHSNGNTYLEWYQQKPGQSPKLLIYKVSNRFSGVPDRFSGSGSGTDFTLTISSLQAEDVAVYYCFQGSHVPNTFGGGTKVEIKGS

SEQ ID NO: 34577 - protein, 117 aa, synthetic construct
  source 1..117: note = Description of Artificial Sequence: Synthetic polypeptide; note = VH of XENP024244
QIQLVQSGSELKKPGASVKVSCKASGYTFSHYGMNWVRQAPGQGLEWMGWINTYTGEPTYADGFTGRFVFSLDTSVSTAYLQISSLKAEDTAVYFCARDYYGSSPYWGQGTLVTVSS

SEQ ID NO: 34578 - protein, 114 aa, synthetic construct; identical to SEQ ID NO: 33651
  source 1..114: note = Description of Artificial Sequence: Synthetic polypeptide; note = VL of XENP024244

SEQ ID NO: 34579 - protein, 5 aa, synthetic construct
  source 1..5: note = Description of Artificial Sequence: Synthetic peptide; note = XENP024244 vhCDR1
HYGMN

SEQ ID NO: 34580 - protein, 17 aa, synthetic construct
  source 1..17: note = Description of Artificial Sequence: Synthetic peptide; note = XENP024244 vhCDR2
WINTYTGEPTYADGFTG

SEQ ID NO: 34581 - protein, 8 aa, synthetic construct
  source 1..8: note = Description of Artificial Sequence: Synthetic peptide; note = XENP024244 vhCDR3
DYYGSSPY

SEQ ID NO: 34582 - protein, 16 aa, synthetic construct
  source 1..16: note = Description of Artificial Sequence: Synthetic peptide; note = XENP024244 vlCDR1
KSSQSIVHSNGNTYLE

SEQ ID NO: 34583 - protein, 7 aa, synthetic construct
  source 1..7: note = Description of Artificial Sequence: Synthetic peptide; note = XENP024244 vlCDR2
KVSNRFS

SEQ ID NO: 34584 - protein, 9 aa, synthetic construct
  source 1..9: note = Description of Artificial Sequence: Synthetic peptide; note = XENP024244 vlCDR3
FQGSHVPNT

SEQ ID NO: 34585 - protein, 251 aa, synthetic construct
  source 1..251: note = Description of Artificial Sequence: Synthetic polypeptide; note = XENP024245 1C11_H3.116_L3_scFv
QIQLVQSGSELKKPGASVKVSCKASGYTFDHYGMNWVRQAPGQGLEWMGWINTYTGEPTYADGFTGRFVFSLDTSVSTAYLQISSLKAEDTAVYFCARDYYGSSPYWGQGTLVTVSSGKPGSGKPGSGKPGSGKPGSDVLMTQSPDSLAVSLGERATINCKSSQSIVHSNGNTYLEWYQQKPGQSPKLLIYKVSNRFSGVPDRFSGSGSGTDFTLTISSLQAEDVAVYYCFQGSHVPNTFGGGTKVEIKGS

SEQ ID NO: 34586 - protein, 117 aa, synthetic construct
  source 1..117: note = Description of Artificial Sequence: Synthetic polypeptide; note = VH of XENP024245
QIQLVQSGSELKKPGASVKVSCKASGYTFDHYGMNWVRQAPGQGLEWMGWINTYTGEPTYADGFTGRFVFSLDTSVSTAYLQISSLKAEDTAVYFCARDYYGSSPYWGQGTLVTVSS

SEQ ID NO: 34587 - protein, 114 aa, synthetic construct; identical to SEQ ID NO: 33651
  source 1..114: note = Description of Artificial Sequence: Synthetic polypeptide; note = VL of XENP024245

SEQ ID NO: 34588 - protein, 5 aa, synthetic construct
  source 1..5: note = Description of Artificial Sequence: Synthetic peptide; note = XENP024245 vhCDR1
HYGMN

SEQ ID NO: 34589 - protein, 17 aa, synthetic construct
  source 1..17: note = Description of Artificial Sequence: Synthetic peptide; note = XENP024245 vhCDR2
WINTYTGEPTYADGFTG

SEQ ID NO: 34590 - protein, 8 aa, synthetic construct
  source 1..8: note = Description of Artificial Sequence: Synthetic peptide; note = XENP024245 vhCDR3
DYYGSSPY

SEQ ID NO: 34591 - protein, 16 aa, synthetic construct
  source 1..16: note = Description of Artificial Sequence: Synthetic peptide; note = XENP024245 vlCDR1
KSSQSIVHSNGNTYLE

SEQ ID NO: 34592 - protein, 7 aa, synthetic construct
  source 1..7: note = Description of Artificial Sequence: Synthetic peptide; note = XENP024245 vlCDR2
KVSNRFS

SEQ ID NO: 34593 - protein, 9 aa, synthetic construct
  source 1..9: note = Description of Artificial Sequence: Synthetic peptide; note = XENP024245 vlCDR3
FQGSHVPNT

SEQ ID NO: 34594 - protein, 251 aa, synthetic construct
  source 1..251: note = Description of Artificial Sequence: Synthetic polypeptide; note = XENP024246 1C11_H3.117_L3_scFv
QIQLVQSGSELKKPGASVKVSCKASGYTFGHYGMNWVRQAPGQGLEWMGWINTYTGEPTYADGFTGRFVFSLDTSVSTAYLQISSLKAEDTAVYFCARDYYGSSPYWGQGTLVTVSSGKPGSGKPGSGKPGSGKPGSDVLMTQSPDSLAVSLGERATINCKSSQSIVHSNGNTYLEWYQQKPGQSPKLLIYKVSNRFSGVPDRFSGSGSGTDFTLTISSLQAEDVAVYYCFQGSHVPNTFGGGTKVEIKGS

SEQ ID NO: 34595 - protein, 117 aa, synthetic construct
  source 1..117: note = Description of Artificial Sequence: Synthetic polypeptide; note = VH of XENP024246
QIQLVQSGSELKKPGASVKVSCKASGYTFGHYGMNWVRQAPGQGLEWMGWINTYTGEPTYADGFTGRFVFSLDTSVSTAYLQISSLKAEDTAVYFCARDYYGSSPYWGQGTLVTVSS

SEQ ID NO: 34596 - protein, 114 aa, synthetic construct; identical to SEQ ID NO: 33651
  source 1..114: note = Description of Artificial Sequence: Synthetic polypeptide; note = VL of XENP024246

SEQ ID NO: 34597 - protein, 5 aa, synthetic construct
  source 1..5: note = Description of Artificial Sequence: Synthetic peptide; note = XENP024246 vhCDR1
HYGMN

SEQ ID NO: 34598 - protein, 17 aa, synthetic construct
  source 1..17: note = Description of Artificial Sequence: Synthetic peptide; note = XENP024246 vhCDR2
WINTYTGEPTYADGFTG

SEQ ID NO: 34599 - protein, 8 aa, synthetic construct
  source 1..8: note = Description of Artificial Sequence: Synthetic peptide; note = XENP024246 vhCDR3
DYYGSSPY

SEQ ID NO: 34600 - protein, 16 aa, synthetic construct
  source 1..16: note = Description of Artificial Sequence: Synthetic peptide; note = XENP024246 vlCDR1
KSSQSIVHSNGNTYLE

SEQ ID NO: 34601 - protein, 7 aa, synthetic construct
  source 1..7: note = Description of Artificial Sequence: Synthetic peptide; note = XENP024246 vlCDR2
KVSNRFS

SEQ ID NO: 34602 - protein, 9 aa, synthetic construct
  source 1..9: note = Description of Artificial Sequence: Synthetic peptide; note = XENP024246 vlCDR3
FQGSHVPNT

SEQ ID NO: 34603 - protein, 251 aa, synthetic construct
  source 1..251: note = Description of Artificial Sequence: Synthetic polypeptide; note = XENP024247 1C11_H3.120_L3_scFv
QIQLVQSGSELKKPGASVKVSCKASGYTFTHYGINWVRQAPGQGLEWMGWINTYTGEPTYADGFTGRFVFSLDTSVSTAYLQISSLKAEDTAVYFCARDYYGSSPYWGQGTLVTVSSGKPGSGKPGSGKPGSGKPGSDVLMTQSPDSLAVSLGERATINCKSSQSIVHSNGNTYLEWYQQKPGQSPKLLIYKVSNRFSGVPDRFSGSGSGTDFTLTISSLQAEDVAVYYCFQGSHVPNTFGGGTKVEIKGS

SEQ ID NO: 34604 - protein, 117 aa, synthetic construct
  source 1..117: note = Description of Artificial Sequence: Synthetic polypeptide; note = VH of XENP024247
QIQLVQSGSELKKPGASVKVSCKASGYTFTHYGINWVRQAPGQGLEWMGWINTYTGEPTYADGFTGRFVFSLDTSVSTAYLQISSLKAEDTAVYFCARDYYGSSPYWGQGTLVTVSS

SEQ ID NO: 34605 - protein, 114 aa, synthetic construct; identical to SEQ ID NO: 33651
  source 1..114: note = Description of Artificial Sequence: Synthetic polypeptide; note = VL of XENP024247

SEQ ID NO: 34606 - protein, 5 aa, synthetic construct
  source 1..5: note = Description of Artificial Sequence: Synthetic peptide; note = XENP024247 vhCDR1
HYGIN

SEQ ID NO: 34607 - protein, 17 aa, synthetic construct
  source 1..17: note = Description of Artificial Sequence: Synthetic peptide; note = XENP024247 vhCDR2
WINTYTGEPTYADGFTG

SEQ ID NO: 34608 - protein, 8 aa, synthetic construct
  source 1..8: note = Description of Artificial Sequence: Synthetic peptide; note = XENP024247 vhCDR3
DYYGSSPY

SEQ ID NO: 34609 - protein, 16 aa, synthetic construct
  source 1..16: note = Description of Artificial Sequence: Synthetic peptide; note = XENP024247 vlCDR1
KSSQSIVHSNGNTYLE

SEQ ID NO: 34610 - protein, 7 aa, synthetic construct
  source 1..7: note = Description of Artificial Sequence: Synthetic peptide; note = XENP024247 vlCDR2
KVSNRFS

SEQ ID NO: 34611 - protein, 9 aa, synthetic construct
  source 1..9: note = Description of Artificial Sequence: Synthetic peptide; note = XENP024247 vlCDR3
FQGSHVPNT

SEQ ID NO: 34612 - protein, 251 aa, synthetic construct
  source 1..251: note = Description of Artificial Sequence: Synthetic polypeptide; note = XENP024248 1C11_H3.121_L3_scFv
QIQLVQSGSELKKPGASVKVSCKASGYTFTHYGVNWVRQAPGQGLEWMGWINTYTGEPTYADGFTGRFVFSLDTSVSTAYLQISSLKAEDTAVYFCARDYYGSSPYWGQGTLVTVSSGKPGSGKPGSGKPGSGKPGSDVLMTQSPDSLAVSLGERATINCKSSQSIVHSNGNTYLEWYQQKPGQSPKLLIYKVSNRFSGVPDRFSGSGSGTDFTLTISSLQAEDVAVYYCFQGSHVPNTFGGGTKVEIKGS

SEQ ID NO: 34613 - protein, 117 aa, synthetic construct
  source 1..117: note = Description of Artificial Sequence: Synthetic polypeptide; note = VH of XENP024248
QIQLVQSGSELKKPGASVKVSCKASGYTFTHYGVNWVRQAPGQGLEWMGWINTYTGEPTYADGFTGRFVFSLDTSVSTAYLQISSLKAEDTAVYFCARDYYGSSPYWGQGTLVTVSS

SEQ ID NO: 34614 - protein, 114 aa, synthetic construct; identical to SEQ ID NO: 33651
  source 1..114: note = Description of Artificial Sequence: Synthetic polypeptide; note = VL of XENP024248

SEQ ID NO: 34615 - protein, 5 aa, synthetic construct
  source 1..5: note = Description of Artificial Sequence: Synthetic peptide; note = XENP024248 vhCDR1
HYGVN

SEQ ID NO: 34616 - protein, 17 aa, synthetic construct
  source 1..17: note = Description of Artificial Sequence: Synthetic peptide; note = XENP024248 vhCDR2
WINTYTGEPTYADGFTG

SEQ ID NO: 34617 - protein, 8 aa, synthetic construct
  source 1..8: note = Description of Artificial Sequence: Synthetic peptide; note = XENP024248 vhCDR3
DYYGSSPY

SEQ ID NO: 34618 - protein, 16 aa, synthetic construct
  source 1..16: note = Description of Artificial Sequence: Synthetic peptide; note = XENP024248 vlCDR1
KSSQSIVHSNGNTYLE

SEQ ID NO: 34619 - protein, 7 aa, synthetic construct
  source 1..7: note = Description of Artificial Sequence: Synthetic peptide; note = XENP024248 vlCDR2
KVSNRFS

SEQ ID NO: 34620 - protein, 9 aa, synthetic construct
  source 1..9: note = Description of Artificial Sequence: Synthetic peptide; note = XENP024248 vlCDR3
FQGSHVPNT

SEQ ID NO: 34621 - protein, 251 aa, synthetic construct
  source 1..251: note = Description of Artificial Sequence: Synthetic polypeptide; note = XENP024249 1C11_H3.123_L3_scFv
QIQLVQSGSELKKPGASVKVSCKASGYTFTHYGMNWIRQAPGQGLEWMGWINTYTGEPTYADGFTGRFVFSLDTSVSTAYLQISSLKAEDTAVYFCARDYYGSSPYWGQGTLVTVSSGKPGSGKPGSGKPGSGKPGSDVLMTQSPDSLAVSLGERATINCKSSQSIVHSNGNTYLEWYQQKPGQSPKLLIYKVSNRFSGVPDRFSGSGSGTDFTLTISSLQAEDVAVYYCFQGSHVPNTFGGGTKVEIKGS

SEQ ID NO: 34622 - protein, 117 aa, synthetic construct
  source 1..117: note = Description of Artificial Sequence: Synthetic polypeptide; note = VH of XENP024249
QIQLVQSGSELKKPGASVKVSCKASGYTFTHYGMNWIRQAPGQGLEWMGWINTYTGEPTYADGFTGRFVFSLDTSVSTAYLQISSLKAEDTAVYFCARDYYGSSPYWGQGTLVTVSS

SEQ ID NO: 34623 - protein, 114 aa, synthetic construct; identical to SEQ ID NO: 33651
  source 1..114: note = Description of Artificial Sequence: Synthetic polypeptide; note = VL of XENP024249

SEQ ID NO: 34624 - protein, 5 aa, synthetic construct
  source 1..5: note = Description of Artificial Sequence: Synthetic peptide; note = XENP024249 vhCDR1
HYGMN

SEQ ID NO: 34625 - protein, 17 aa, synthetic construct
  source 1..17: note = Description of Artificial Sequence: Synthetic peptide; note = XENP024249 vhCDR2
WINTYTGEPTYADGFTG

SEQ ID NO: 34626 - protein, 8 aa, synthetic construct
  source 1..8: note = Description of Artificial Sequence: Synthetic peptide; note = XENP024249 vhCDR3
DYYGSSPY

SEQ ID NO: 34627 - protein, 16 aa, synthetic construct
  source 1..16: note = Description of Artificial Sequence: Synthetic peptide; note = XENP024249 vlCDR1
KSSQSIVHSNGNTYLE

SEQ ID NO: 34628 - protein, 7 aa, synthetic construct
  source 1..7: note = Description of Artificial Sequence: Synthetic peptide; note = XENP024249 vlCDR2
KVSNRFS

SEQ ID NO: 34629 - protein, 9 aa, synthetic construct
  source 1..9: note = Description of Artificial Sequence: Synthetic peptide; note = XENP024249 vlCDR3
FQGSHVPNT

SEQ ID NO: 34630 - protein, 251 aa, synthetic construct
  source 1..251: note = Description of Artificial Sequence: Synthetic polypeptide; note = XENP024250 1C11_H3.125_L3_scFv
QIQLVQSGSELKKPGASVKVSCKASGYTFTHYGMNWVRQPPGQGLEWMGWINTYTGEPTYADGFTGRFVFSLDTSVSTAYLQISSLKAEDTAVYFCARDYYGSSPYWGQGTLVTVSSGKPGSGKPGSGKPGSGKPGSDVLMTQSPDSLAVSLGERATINCKSSQSIVHSNGNTYLEWYQQKPGQSPKLLIYKVSNRFSGVPDRFSGSGSGTDFTLTISSLQAEDVAVYYCFQGSHVPNTFGGGTKVEIKGS

SEQ ID NO: 34631 - protein, 117 aa, synthetic construct
  source 1..117: note = Description of Artificial Sequence: Synthetic polypeptide; note = VH of XENP024250
QIQLVQSGSELKKPGASVKVSCKASGYTFTHYGMNWVRQPPGQGLEWMGWINTYTGEPTYADGFTGRFVFSLDTSVSTAYLQISSLKAEDTAVYFCARDYYGSSPYWGQGTLVTVSS

SEQ ID NO: 34632 - protein, 114 aa, synthetic construct; identical to SEQ ID NO: 33651
  source 1..114: note = Description of Artificial Sequence: Synthetic polypeptide; note = VL of XENP024250

SEQ ID NO: 34633 - protein, 5 aa, synthetic construct
  source 1..5: note = Description of Artificial Sequence: Synthetic peptide; note = XENP024250 vhCDR1
HYGMN

SEQ ID NO: 34634 - protein, 17 aa, synthetic construct
  source 1..17: note = Description of Artificial Sequence: Synthetic peptide; note = XENP024250 vhCDR2
WINTYTGEPTYADGFTG

SEQ ID NO: 34635 - protein, 8 aa, synthetic construct
  source 1..8: note = Description of Artificial Sequence: Synthetic peptide; note = XENP024250 vhCDR3
DYYGSSPY

SEQ ID NO: 34636 - protein, 16 aa, synthetic construct
  source 1..16: note = Description of Artificial Sequence: Synthetic peptide; note = XENP024250 vlCDR1
KSSQSIVHSNGNTYLE

SEQ ID NO: 34637 - protein, 7 aa, synthetic construct
  source 1..7: note = Description of Artificial Sequence: Synthetic peptide; note = XENP024250 vlCDR2
KVSNRFS

SEQ ID NO: 34638 - protein, 9 aa, synthetic construct
  source 1..9: note = Description of Artificial Sequence: Synthetic peptide; note = XENP024250 vlCDR3
FQGSHVPNT

SEQ ID NO: 34639 - protein, 251 aa, synthetic construct
  source 1..251: note = Description of Artificial Sequence: Synthetic polypeptide; note = XENP024251 1C11_H3.126_L3_scFv
QIQLVQSGSELKKPGASVKVSCKASGYTFTHYGMNWVRQATGQGLEWMGWINTYTGEPTYADGFTGRFVFSLDTSVSTAYLQISSLKAEDTAVYFCARDYYGSSPYWGQGTLVTVSSGKPGSGKPGSGKPGSGKPGSDVLMTQSPDSLAVSLGERATINCKSSQSIVHSNGNTYLEWYQQKPGQSPKLLIYKVSNRFSGVPDRFSGSGSGTDFTLTISSLQAEDVAVYYCFQGSHVPNTFGGGTKVEIKGS

SEQ ID NO: 34640 - protein, 117 aa, synthetic construct
  source 1..117: note = Description of Artificial Sequence: Synthetic polypeptide; note = VH of XENP024251
QIQLVQSGSELKKPGASVKVSCKASGYTFTHYGMNWVRQATGQGLEWMGWINTYTGEPTYADGFTGRFVFSLDTSVSTAYLQISSLKAEDTAVYFCARDYYGSSPYWGQGTLVTVSS

SEQ ID NO: 34641 - protein, 114 aa, synthetic construct; identical to SEQ ID NO: 33651
  source 1..114: note = Description of Artificial Sequence: Synthetic polypeptide; note = VL of XENP024251

SEQ ID NO: 34642 - protein, 5 aa, synthetic construct
  source 1..5: note = Description of Artificial Sequence: Synthetic peptide; note = XENP024251 vhCDR1
HYGMN

SEQ ID NO: 34643 - protein, 17 aa, synthetic construct
  source 1..17: note = Description of Artificial Sequence: Synthetic peptide; note = XENP024251 vhCDR2
WINTYTGEPTYADGFTG

SEQ ID NO: 34644 - protein, 8 aa, synthetic construct
  source 1..8: note = Description of Artificial Sequence: Synthetic peptide; note = XENP024251 vhCDR3
DYYGSSPY

SEQ ID NO: 34645 - protein, 16 aa, synthetic construct
  source 1..16: note = Description of Artificial Sequence: Synthetic peptide; note = XENP024251 vlCDR1
KSSQSIVHSNGNTYLE

SEQ ID NO: 34646 - protein, 7 aa, synthetic construct
  source 1..7: note = Description of Artificial Sequence: Synthetic peptide; note = XENP024251 vlCDR2
KVSNRFS

SEQ ID NO: 34647 - protein, 9 aa, synthetic construct
  source 1..9: note = Description of Artificial Sequence: Synthetic peptide; note = XENP024251 vlCDR3
FQGSHVPNT

SEQ ID NO: 34648 - protein, 251 aa, synthetic construct
  source 1..251: note = Description of Artificial Sequence: Synthetic polypeptide; note = XENP024252 1C11_H3.127_L3_scFv
QIQLVQSGSELKKPGASVKVSCKASGYTFTHYGMNWVRQAPGQALEWMGWINTYTGEPTYADGFTGRFVFSLDTSVSTAYLQISSLKAEDTAVYFCARDYYGSSPYWGQGTLVTVSSGKPGSGKPGSGKPGSGKPGSDVLMTQSPDSLAVSLGERATINCKSSQSIVHSNGNTYLEWYQQKPGQSPKLLIYKVSNRFSGVPDRFSGSGSGTDFTLTISSLQAEDVAVYYCFQGSHVPNTFGGGTKVEIKGS

SEQ ID NO: 34649 - protein, 117 aa, synthetic construct
  source 1..117: note = Description of Artificial Sequence: Synthetic polypeptide; note = VH of XENP024252
QIQLVQSGSELKKPGASVKVSCKASGYTFTHYGMNWVRQAPGQALEWMGWINTYTGEPTYADGFTGRFVFSLDTSVSTAYLQISSLKAEDTAVYFCARDYYGSSPYWGQGTLVTVSS

SEQ ID NO: 34650 - protein, 114 aa, synthetic construct; identical to SEQ ID NO: 33651
  source 1..114: note = Description of Artificial Sequence: Synthetic polypeptide; note = VL of XENP024252

SEQ ID NO: 34651 - protein, 5 aa, synthetic construct
  source 1..5: note = Description of Artificial Sequence: Synthetic peptide; note = XENP024252 vhCDR1
HYGMN

SEQ ID NO: 34652 - protein, 17 aa, synthetic construct
  source 1..17: note = Description of Artificial Sequence: Synthetic peptide; note = XENP024252 vhCDR2
WINTYTGEPTYADGFTG

SEQ ID NO: 34653 - protein, 8 aa, synthetic construct
  source 1..8: note = Description of Artificial Sequence: Synthetic peptide; note = XENP024252 vhCDR3
DYYGSSPY

SEQ ID NO: 34654 - protein, 16 aa, synthetic construct
  source 1..16: note = Description of Artificial Sequence: Synthetic peptide; note = XENP024252 vlCDR1
KSSQSIVHSNGNTYLE

SEQ ID NO: 34655 - protein, 7 aa, synthetic construct
  source 1..7: note = Description of Artificial Sequence: Synthetic peptide; note = XENP024252 vlCDR2
KVSNRFS

SEQ ID NO: 34656 - protein, 9 aa, synthetic construct
  source 1..9: note = Description of Artificial Sequence: Synthetic peptide; note = XENP024252 vlCDR3
FQGSHVPNT

SEQ ID NO: 34657 - protein, 251 aa, synthetic construct
  source 1..251: note = Description of Artificial Sequence: Synthetic polypeptide; note = XENP024253 1C11_H3.128_L3_scFv
QIQLVQSGSELKKPGASVKVSCKASGYTFTHYGMNWVRQAPGQGLEWVGWINTYTGEPTYADGFTGRFVFSLDTSVSTAYLQISSLKAEDTAVYFCARDYYGSSPYWGQGTLVTVSSGKPGSGKPGSGKPGSGKPGSDVLMTQSPDSLAVSLGERATINCKSSQSIVHSNGNTYLEWYQQKPGQSPKLLIYKVSNRFSGVPDRFSGSGSGTDFTLTISSLQAEDVAVYYCFQGSHVPNTFGGGTKVEIKGS

SEQ ID NO: 34658 - protein, 117 aa, synthetic construct
  source 1..117: note = Description of Artificial Sequence: Synthetic polypeptide; note = VH of XENP024253
QIQLVQSGSELKKPGASVKVSCKASGYTFTHYGMNWVRQAPGQGLEWVGWINTYTGEPTYADGFTGRFVFSLDTSVSTAYLQISSLKAEDTAVYFCARDYYGSSPYWGQGTLVTVSS

SEQ ID NO: 34659 - protein, 114 aa, synthetic construct; identical to SEQ ID NO: 33651
  source 1..114: note = Description of Artificial Sequence: Synthetic polypeptide; note = VL of XENP024253

SEQ ID NO: 34660 - protein, 5 aa, synthetic construct
  source 1..5: note = Description of Artificial Sequence: Synthetic peptide; note = XENP024253 vhCDR1
HYGMN

SEQ ID NO: 34661 - protein, 17 aa, synthetic construct
  source 1..17: note = Description of Artificial Sequence: Synthetic peptide; note = XENP024253 vhCDR2
WINTYTGEPTYADGFTG

SEQ ID NO: 34662 - protein, 8 aa, synthetic construct
  source 1..8: note = Description of Artificial Sequence: Synthetic peptide; note = XENP024253 vhCDR3
DYYGSSPY

SEQ ID NO: 34663 - protein, 16 aa, synthetic construct
  source 1..16: note = Description of Artificial Sequence: Synthetic peptide; note = XENP024253 vlCDR1
KSSQSIVHSNGNTYLE

SEQ ID NO: 34664 - protein, 7 aa, synthetic construct
  source 1..7: note = Description of Artificial Sequence: Synthetic peptide; note = XENP024253 vlCDR2
KVSNRFS

SEQ ID NO: 34665 - protein, 9 aa, synthetic construct
  source 1..9: note = Description of Artificial Sequence: Synthetic peptide; note = XENP024253 vlCDR3
FQGSHVPNT

SEQ ID NO: 34666 - protein, 251 aa, synthetic construct
  source 1..251: note = Description of Artificial Sequence: Synthetic polypeptide; note = XENP024254 1C11_H3.129_L3_scFv
QIQLVQSGSELKKPGASVKVSCKASGYTFTHYGMNWVRQAPGQGLEWIGWINTYTGEPTYADGFTGRFVFSLDTSVSTAYLQISSLKAEDTAVYFCARDYYGSSPYWGQGTLVTVSSGKPGSGKPGSGKPGSGKPGSDVLMTQSPDSLAVSLGERATINCKSSQSIVHSNGNTYLEWYQQKPGQSPKLLIYKVSNRFSGVPDRFSGSGSGTDFTLTISSLQAEDVAVYYCFQGSHVPNTFGGGTKVEIKGS

SEQ ID NO: 34667 - protein, 117 aa, synthetic construct
  source 1..117: note = Description of Artificial Sequence: Synthetic polypeptide; note = VH of XENP024254
QIQLVQSGSELKKPGASVKVSCKASGYTFTHYGMNWVRQAPGQGLEWIGWINTYTGEPTYADGFTGRFVFSLDTSVSTAYLQISSLKAEDTAVYFCARDYYGSSPYWGQGTLVTVSS

SEQ ID NO: 34668 - protein, 114 aa, synthetic construct; identical to SEQ ID NO: 33651
  source 1..114: note = Description of Artificial Sequence: Synthetic polypeptide; note = VL of XENP024254

SEQ ID NO: 34669 - protein, 5 aa, synthetic construct
  source 1..5: note = Description of Artificial Sequence: Synthetic peptide; note = XENP024254 vhCDR1
HYGMN

SEQ ID NO: 34670 - protein, 17 aa, synthetic construct
  source 1..17: note = Description of Artificial Sequence: Synthetic peptide; note = XENP024254 vhCDR2
WINTYTGEPTYADGFTG

SEQ ID NO: 34671 - protein, 8 aa, synthetic construct
  source 1..8: note = Description of Artificial Sequence: Synthetic peptide; note = XENP024254 vhCDR3
DYYGSSPY

SEQ ID NO: 34672 - protein, 16 aa, synthetic construct
  source 1..16: note = Description of Artificial Sequence: Synthetic peptide; note = XENP024254 vlCDR1
KSSQSIVHSNGNTYLE

SEQ ID NO: 34673 - protein, 7 aa, synthetic construct
  source 1..7: note = Description of Artificial Sequence: Synthetic peptide; note = XENP024254 vlCDR2
KVSNRFS

SEQ ID NO: 34674 - protein, 9 aa, synthetic construct
  source 1..9: note = Description of Artificial Sequence: Synthetic peptide; note = XENP024254 vlCDR3
FQGSHVPNT

SEQ ID NO: 34675 - protein, 251 aa, synthetic construct
  source 1..251: note = Description of Artificial Sequence: Synthetic polypeptide; note = XENP024255 1C11_H3.130_L3_scFv
QIQLVQSGSELKKPGASVKVSCKASGYTFTHYGMNWVRQAPGQGLEWMSWINTYTGEPTYADGFTGRFVFSLDTSVSTAYLQISSLKAEDTAVYFCARDYYGSSPYWGQGTLVTVSSGKPGSGKPGSGKPGSGKPGSDVLMTQSPDSLAVSLGERATINCKSSQSIVHSNGNTYLEWYQQKPGQSPKLLIYKVSNRFSGVPDRFSGSGSGTDFTLTISSLQAEDVAVYYCFQGSHVPNTFGGGTKVEIKGS

SEQ ID NO: 34676 - protein, 117 aa, synthetic construct
  source 1..117: note = Description of Artificial Sequence: Synthetic polypeptide; note = VH of XENP024255
QIQLVQSGSELKKPGASVKVSCKASGYTFTHYGMNWVRQAPGQGLEWMSWINTYTGEPTYADGFTGRFVFSLDTSVSTAYLQISSLKAEDTAVYFCARDYYGSSPYWGQGTLVTVSS

SEQ ID NO: 34677 - protein, 114 aa, synthetic construct; identical to SEQ ID NO: 33651
  source 1..114: note = Description of Artificial Sequence: Synthetic polypeptide; note = VL of XENP024255

SEQ ID NO: 34678 - protein, 5 aa, synthetic construct
  source 1..5: note = Description of Artificial Sequence: Synthetic peptide; note = XENP024255 vhCDR1
HYGMN

SEQ ID NO: 34679 - protein, 17 aa, synthetic construct
  source 1..17: note = Description of Artificial Sequence: Synthetic peptide; note = XENP024255 vhCDR2
WINTYTGEPTYADGFTG

SEQ ID NO: 34680 - protein, 8 aa, synthetic construct
  source 1..8: note = Description of Artificial Sequence: Synthetic peptide; note = XENP024255 vhCDR3
DYYGSSPY

SEQ ID NO: 34681 - protein, 16 aa, synthetic construct
  source 1..16: note = Description of Artificial Sequence: Synthetic peptide; note = XENP024255 vlCDR1
KSSQSIVHSNGNTYLE

SEQ ID NO: 34682 - protein, 7 aa, synthetic construct
  source 1..7: note = Description of Artificial Sequence: Synthetic peptide; note = XENP024255 vlCDR2
KVSNRFS

SEQ ID NO: 34683 - protein, 9 aa, synthetic construct
  source 1..9: note = Description of Artificial Sequence: Synthetic peptide; note = XENP024255 vlCDR3
FQGSHVPNT

SEQ ID NO: 34684 - protein, 251 aa, synthetic construct
  source 1..251: note = Description of Artificial Sequence: Synthetic polypeptide; note = XENP024256 1C11_H3.134_L3_scFv
QIQLVQSGSELKKPGASVKVSCKASGYTFTHYGMNWVRQAPGQGLEWMGWINTKTGEPTYADGFTGRFVFSLDTSVSTAYLQISSLKAEDTAVYFCARDYYGSSPYWGQGTLVTVSSGKPGSGKPGSGKPGSGKPGSDVLMTQSPDSLAVSLGERATINCKSSQSIVHSNGNTYLEWYQQKPGQSPKLLIYKVSNRFSGVPDRFSGSGSGTDFTLTISSLQAEDVAVYYCFQGSHVPNTFGGGTKVEIKGS

SEQ ID NO: 34685 - protein, 117 aa, synthetic construct
  source 1..117: note = Description of Artificial Sequence: Synthetic polypeptide; note = VH of XENP024256
QIQLVQSGSELKKPGASVKVSCKASGYTFTHYGMNWVRQAPGQGLEWMGWINTKTGEPTYADGFTGRFVFSLDTSVSTAYLQISSLKAEDTAVYFCARDYYGSSPYWGQGTLVTVSS

SEQ ID NO: 34686 - protein, 114 aa, synthetic construct; identical to SEQ ID NO: 33651
  source 1..114: note = Description of Artificial Sequence: Synthetic polypeptide; note = VL of XENP024256

SEQ ID NO: 34687 - protein, 5 aa, synthetic construct
  source 1..5: note = Description of Artificial Sequence: Synthetic peptide; note = XENP024256 vhCDR1
HYGMN

SEQ ID NO: 34688 - protein, 17 aa, synthetic construct
  source 1..17: note = Description of Artificial Sequence: Synthetic peptide; note = XENP024256 vhCDR2
WINTKTGEPTYADGFTG

SEQ ID NO: 34689 - protein, 8 aa, synthetic construct
  source 1..8: note = Description of Artificial Sequence: Synthetic peptide; note = XENP024256 vhCDR3
DYYGSSPY

SEQ ID NO: 34690 - protein, 16 aa, synthetic construct
  source 1..16: note = Description of Artificial Sequence: Synthetic peptide; note = XENP024256 vlCDR1
KSSQSIVHSNGNTYLE

SEQ ID NO: 34691 - protein, 7 aa, synthetic construct
  source 1..7: note = Description of Artificial Sequence: Synthetic peptide; note = XENP024256 vlCDR2
KVSNRFS

SEQ ID NO: 34692 - protein, 9 aa, synthetic construct
  source 1..9: note = Description of Artificial Sequence: Synthetic peptide; note = XENP024256 vlCDR3
FQGSHVPNT

SEQ ID NO: 34693 - protein, 251 aa, synthetic construct
  source 1..251: note = Description of Artificial Sequence: Synthetic polypeptide; note = XENP024257 1C11_H3.135_L3_scFv
QIQLVQSGSELKKPGASVKVSCKASGYTFTHYGMNWVRQAPGQGLEWMGWINTYTSEPTYADGFTGRFVFSLDTSVSTAYLQISSLKAEDTAVYFCARDYYGSSPYWGQGTLVTVSSGKPGSGKPGSGKPGSGKPGSDVLMTQSPDSLAVSLGERATINCKSSQSIVHSNGNTYLEWYQQKPGQSPKLLIYKVSNRFSGVPDRFSGSGSGTDFTLTISSLQAEDVAVYYCFQGSHVPNTFGGGTKVEIKGS

SEQ ID NO: 34694 - protein, 117 aa, synthetic construct
  source 1..117: note = Description of Artificial Sequence: Synthetic polypeptide; note = VH of XENP024257
QIQLVQSGSELKKPGASVKVSCKASGYTFTHYGMNWVRQAPGQGLEWMGWINTYTSEPTYADGFTGRFVFSLDTSVSTAYLQISSLKAEDTAVYFCARDYYGSSPYWGQGTLVTVSS

SEQ ID NO: 34695 - protein, 114 aa, synthetic construct; identical to SEQ ID NO: 33651
  source 1..114: note = Description of Artificial Sequence: Synthetic polypeptide; note = VL of XENP024257

SEQ ID NO: 34696 - protein, 5 aa, synthetic construct
  source 1..5: note = Description of Artificial Sequence: Synthetic peptide; note = XENP024257 vhCDR1
HYGMN

SEQ ID NO: 34697 - protein, 17 aa, synthetic construct
  source 1..17: note = Description of Artificial Sequence: Synthetic peptide; note = XENP024257 vhCDR2
WINTYTSEPTYADGFTG

SEQ ID NO: 34698 - protein, 8 aa, synthetic construct
  source 1..8: note = Description of Artificial Sequence: Synthetic peptide; note = XENP024257 vhCDR3
DYYGSSPY

SEQ ID NO: 34699 - protein, 16 aa, synthetic construct
  source 1..16: note = Description of Artificial Sequence: Synthetic peptide; note = XENP024257 vlCDR1
KSSQSIVHSNGNTYLE

SEQ ID NO: 34700 - protein, 7 aa, synthetic construct
  source 1..7: note = Description of Artificial Sequence: Synthetic peptide; note = XENP024257 vlCDR2
KVSNRFS

SEQ ID NO: 34701 - protein, 9 aa, synthetic construct
  source 1..9: note = Description of Artificial Sequence: Synthetic peptide; note = XENP024257 vlCDR3
FQGSHVPNT

SEQ ID NO: 34702 - protein, 251 aa, synthetic construct
  source 1..251: note = Description of Artificial Sequence: Synthetic polypeptide; note = XENP024258 1C11_H3.136_L3_scFv
QIQLVQSGSELKKPGASVKVSCKASGYTFTHYGMNWVRQAPGQGLEWMGWINTYTGSPTYADGFTGRFVFSLDTSVSTAYLQISSLKAEDTAVYFCARDYYGSSPYWGQGTLVTVSSGKPGSGKPGSGKPGSGKPGSDVLMTQSPDSLAVSLGERATINCKSSQSIVHSNGNTYLEWYQQKPGQSPKLLIYKVSNRFSGVPDRFSGSGSGTDFTLTISSLQAEDVAVYYCFQGSHVPNTFGGGTKVEIKGS

SEQ ID NO: 34703 - protein, 117 aa, synthetic construct
  source 1..117: note = Description of Artificial Sequence: Synthetic polypeptide; note = VH of XENP024258
QIQLVQSGSELKKPGASVKVSCKASGYTFTHYGMNWVRQAPGQGLEWMGWINTYTGSPTYADGFTGRFVFSLDTSVSTAYLQISSLKAEDTAVYFCARDYYGSSPYWGQGTLVTVSS

SEQ ID NO: 34704 - protein, 114 aa, synthetic construct; identical to SEQ ID NO: 33651
  source 1..114: note = Description of Artificial Sequence: Synthetic polypeptide; note = VL of XENP024258

SEQ ID NO: 34705 - protein, 5 aa, synthetic construct
  source 1..5: note = Description of Artificial Sequence: Synthetic peptide; note = XENP024258 vhCDR1
HYGMN

SEQ ID NO: 34706 - protein, 17 aa, synthetic construct
  source 1..17: note = Description of Artificial Sequence: Synthetic peptide; note = XENP024258 vhCDR2
WINTYTGSPTYADGFTG

SEQ ID NO: 34707 - protein, 8 aa, synthetic construct
  source 1..8: note = Description of Artificial Sequence: Synthetic peptide; note = XENP024258 vhCDR3
DYYGSSPY

SEQ ID NO: 34708 - protein, 16 aa, synthetic construct
  source 1..16: note = Description of Artificial Sequence: Synthetic peptide; note = XENP024258 vlCDR1
KSSQSIVHSNGNTYLE

SEQ ID NO: 34709 - protein, 7 aa, synthetic construct
  source 1..7: note = Description of Artificial Sequence: Synthetic peptide; note = XENP024258 vlCDR2
KVSNRFS

SEQ ID NO: 34710 - protein, 9 aa, synthetic construct
  source 1..9: note = Description of Artificial Sequence: Synthetic peptide; note = XENP024258 vlCDR3
FQGSHVPNT

SEQ ID NO: 34711 - protein, 251 aa, synthetic construct
  source 1..251: note = Description of Artificial Sequence: Synthetic polypeptide; note = XENP024259 1C11_H3.137_L3_scFv
QIQLVQSGSELKKPGASVKVSCKASGYTFTHYGMNWVRQAPGQGLEWMGWINTYTGNPTYADGFTGRFVFSLDTSVSTAYLQISSLKAEDTAVYFCARDYYGSSPYWGQGTLVTVSSGKPGSGKPGSGKPGSGKPGSDVLMTQSPDSLAVSLGERATINCKSSQSIVHSNGNTYLEWYQQKPGQSPKLLIYKVSNRFSGVPDRFSGSGSGTDFTLTISSLQAEDVAVYYCFQGSHVPNTFGGGTKVEIKGS

SEQ ID NO: 34712 - protein, 117 aa, synthetic construct
  source 1..117: note = Description of Artificial Sequence: Synthetic polypeptide; note = VH of XENP024259
QIQLVQSGSELKKPGASVKVSCKASGYTFTHYGMNWVRQAPGQGLEWMGWINTYTGNPTYADGFTGRFVFSLDTSVSTAYLQISSLKAEDTAVYFCARDYYGSSPYWGQGTLVTVSS

SEQ ID NO: 34713 - protein, 114 aa, synthetic construct; identical to SEQ ID NO: 33651
  source 1..114: note = Description of Artificial Sequence: Synthetic polypeptide; note = VL of XENP024259

SEQ ID NO: 34714 - protein, 5 aa, synthetic construct
  source 1..5: note = Description of Artificial Sequence: Synthetic peptide; note = XENP024259 vhCDR1
HYGMN

SEQ ID NO: 34715 - protein, 17 aa, synthetic construct
  source 1..17: note = Description of Artificial Sequence: Synthetic peptide; note = XENP024259 vhCDR2
WINTYTGNPTYADGFTG

SEQ ID NO: 34716 - protein, 8 aa, synthetic construct
  source 1..8: note = Description of Artificial Sequence: Synthetic peptide; note = XENP024259 vhCDR3
DYYGSSPY

SEQ ID NO: 34717 - protein, 16 aa, synthetic construct
  source 1..16: note = Description of Artificial Sequence: Synthetic peptide; note = XENP024259 vlCDR1
KSSQSIVHSNGNTYLE

SEQ ID NO: 34718 - protein, 7 aa, synthetic construct
  source 1..7: note = Description of Artificial Sequence: Synthetic peptide; note = XENP024259 vlCDR2
KVSNRFS

SEQ ID NO: 34719 - protein, 9 aa, synthetic construct
  source 1..9: note = Description of Artificial Sequence: Synthetic peptide; note = XENP024259 vlCDR3
FQGSHVPNT

SEQ ID NO: 34720 - protein, 251 aa, synthetic construct
  source 1..251: note = Description of Artificial Sequence: Synthetic polypeptide; note = XENP024260 1C11_H3.138_L3_scFv
QIQLVQSGSELKKPGASVKVSCKASGYTFTHYGMNWVRQAPGQGLEWMGWINTYTGDPTYADGFTGRFVFSLDTSVSTAYLQISSLKAEDTAVYFCARDYYGSSPYWGQGTLVTVSSGKPGSGKPGSGKPGSGKPGSDVLMTQSPDSLAVSLGERATINCKSSQSIVHSNGNTYLEWYQQKPGQSPKLLIYKVSNRFSGVPDRFSGSGSGTDFTLTISSLQAEDVAVYYCFQGSHVPNTFGGGTKVEIKGS

SEQ ID NO: 34721 - protein, 117 aa, synthetic construct
  source 1..117: note = Description of Artificial Sequence: Synthetic polypeptide; note = VH of XENP024260
QIQLVQSGSELKKPGASVKVSCKASGYTFTHYGMNWVRQAPGQGLEWMGWINTYTGDPTYADGFTGRFVFSLDTSVSTAYLQISSLKAEDTAVYFCARDYYGSSPYWGQGTLVTVSS

SEQ ID NO: 34722 - protein, 114 aa, synthetic construct; identical to SEQ ID NO: 33651
  source 1..114: note = Description of Artificial Sequence: Synthetic polypeptide; note = VL of XENP024260

SEQ ID NO: 34723 - protein, 5 aa, synthetic construct
  source 1..5: note = Description of Artificial Sequence: Synthetic peptide; note = XENP024260 vhCDR1
HYGMN

SEQ ID NO: 34724 - protein, 17 aa, synthetic construct
  source 1..17: note = Description of Artificial Sequence: Synthetic peptide; note = XENP024260 vhCDR2
WINTYTGDPTYADGFTG

SEQ ID NO: 34725 - protein, 8 aa, synthetic construct
  source 1..8: note = Description of Artificial Sequence: Synthetic peptide; note = XENP024260 vhCDR3
DYYGSSPY

SEQ ID NO: 34726 - protein, 16 aa, synthetic construct
  source 1..16: note = Description of Artificial Sequence: Synthetic peptide; note = XENP024260 vlCDR1
KSSQSIVHSNGNTYLE

SEQ ID NO: 34727 - protein, 7 aa, synthetic construct
  source 1..7: note = Description of Artificial Sequence: Synthetic peptide; note = XENP024260 vlCDR2
KVSNRFS

SEQ ID NO: 34728 - protein, 9 aa, synthetic construct
  source 1..9: note = Description of Artificial Sequence: Synthetic peptide; note = XENP024260 vlCDR3
FQGSHVPNT

SEQ ID NO: 34729 - protein, 251 aa, synthetic construct
  source 1..251: note = Description of Artificial Sequence: Synthetic polypeptide; note = XENP024261 1C11_H3.139_L3_scFv
QIQLVQSGSELKKPGASVKVSCKASGYTFTHYGMNWVRQAPGQGLEWMGWINTYTGTPTYADGFTGRFVFSLDTSVSTAYLQISSLKAEDTAVYFCARDYYGSSPYWGQGTLVTVSSGKPGSGKPGSGKPGSGKPGSDVLMTQSPDSLAVSLGERATINCKSSQSIVHSNGNTYLEWYQQKPGQSPKLLIYKVSNRFSGVPDRFSGSGSGTDFTLTISSLQAEDVAVYYCFQGSHVPNTFGGGTKVEIKGS

SEQ ID NO: 34730 - protein, 117 aa, synthetic construct
  source 1..117: note = Description of Artificial Sequence: Synthetic polypeptide; note = VH of XENP024261
QIQLVQSGSELKKPGASVKVSCKASGYTFTHYGMNWVRQAPGQGLEWMGWINTYTGTPTYADGFTGRFVFSLDTSVSTAYLQISSLKAEDTAVYFCARDYYGSSPYWGQGTLVTVSS

SEQ ID NO: 34731 - protein, 114 aa, synthetic construct; identical to SEQ ID NO: 33651
  source 1..114: note = Description of Artificial Sequence: Synthetic polypeptide; note = VL of XENP024261

SEQ ID NO: 34732 - protein, 5 aa, synthetic construct
  source 1..5: note = Description of Artificial Sequence: Synthetic peptide; note = XENP024261 vhCDR1
HYGMN

SEQ ID NO: 34733 - protein, 17 aa, synthetic construct
  source 1..17: note = Description of Artificial Sequence: Synthetic peptide; note = XENP024261 vhCDR2
WINTYTGTPTYADGFTG

SEQ ID NO: 34734 - protein, 8 aa, synthetic construct
  source 1..8: note = Description of Artificial Sequence: Synthetic peptide; note = XENP024261 vhCDR3
DYYGSSPY

SEQ ID NO: 34735 - protein, 16 aa, synthetic construct
  source 1..16: note = Description of Artificial Sequence: Synthetic peptide; note = XENP024261 vlCDR1
KSSQSIVHSNGNTYLE

SEQ ID NO: 34736 - protein, 7 aa, synthetic construct
  source 1..7: note = Description of Artificial Sequence: Synthetic peptide; note = XENP024261 vlCDR2
KVSNRFS

SEQ ID NO: 34737 - protein, 9 aa, synthetic construct
  source 1..9: note = Description of Artificial Sequence: Synthetic peptide; note = XENP024261 vlCDR3
FQGSHVPNT

SEQ ID NO: 34738 - protein, 251 aa, synthetic construct
  source 1..251: note = Description of Artificial Sequence: Synthetic polypeptide; note = XENP024262 1C11_H3.140_L3_scFv
QIQLVQSGSELKKPGASVKVSCKASGYTFTHYGMNWVRQAPGQGLEWMGWINTYTGYPTYADGFTGRFVFSLDTSVSTAYLQISSLKAEDTAVYFCARDYYGSSPYWGQGTLVTVSSGKPGSGKPGSGKPGSGKPGSDVLMTQSPDSLAVSLGERATINCKSSQSIVHSNGNTYLEWYQQKPGQSPKLLIYKVSNRFSGVPDRFSGSGSGTDFTLTISSLQAEDVAVYYCFQGSHVPNTFGGGTKVEIKGS

SEQ ID NO: 34739 - protein, 117 aa, synthetic construct
  source 1..117: note = Description of Artificial Sequence: Synthetic polypeptide; note = VH of XENP024262
QIQLVQSGSELKKPGASVKVSCKASGYTFTHYGMNWVRQAPGQGLEWMGWINTYTGYPTYADGFTGRFVFSLDTSVSTAYLQISSLKAEDTAVYFCARDYYGSSPYWGQGTLVTVSS

SEQ ID NO: 34740 - protein, 114 aa, synthetic construct; identical to SEQ ID NO: 33651
  source 1..114: note = Description of Artificial Sequence: Synthetic polypeptide; note = VL of XENP024262

SEQ ID NO: 34741 - protein, 5 aa, synthetic construct
  source 1..5: note = Description of Artificial Sequence: Synthetic peptide; note = XENP024262 vhCDR1
HYGMN

SEQ ID NO: 34742 - protein, 17 aa, synthetic construct
  source 1..17: note = Description of Artificial Sequence: Synthetic peptide; note = XENP024262 vhCDR2
WINTYTGYPTYADGFTG

SEQ ID NO: 34743 - protein, 8 aa, synthetic construct
  source 1..8: note = Description of Artificial Sequence: Synthetic peptide; note = XENP024262 vhCDR3
DYYGSSPY

SEQ ID NO: 34744 - protein, 16 aa, synthetic construct
  source 1..16: note = Description of Artificial Sequence: Synthetic peptide; note = XENP024262 vlCDR1
KSSQSIVHSNGNTYLE

SEQ ID NO: 34745 - protein, 7 aa, synthetic construct
  source 1..7: note = Description of Artificial Sequence: Synthetic peptide; note = XENP024262 vlCDR2
KVSNRFS

SEQ ID NO: 34746 - protein, 9 aa, synthetic construct
  source 1..9: note = Description of Artificial Sequence: Synthetic peptide; note = XENP024262 vlCDR3
FQGSHVPNT

SEQ ID NO: 34747 - protein, 251 aa, synthetic construct
  source 1..251: note = Description of Artificial Sequence: Synthetic polypeptide; note = XENP024263 1C11_H3.143_L3_scFv
QIQLVQSGSELKKPGASVKVSCKASGYTFTHYGMNWVRQAPGQGLEWMGWINTYTGEPYYADGFTGRFVFSLDTSVSTAYLQISSLKAEDTAVYFCARDYYGSSPYWGQGTLVTVSSGKPGSGKPGSGKPGSGKPGSDVLMTQSPDSLAVSLGERATINCKSSQSIVHSNGNTYLEWYQQKPGQSPKLLIYKVSNRFSGVPDRFSGSGSGTDFTLTISSLQAEDVAVYYCFQGSHVPNTFGGGTKVEIKGS

SEQ ID NO: 34748 - protein, 117 aa, synthetic construct
  source 1..117: note = Description of Artificial Sequence: Synthetic polypeptide; note = VH of XENP024263
QIQLVQSGSELKKPGASVKVSCKASGYTFTHYGMNWVRQAPGQGLEWMGWINTYTGEPYYADGFTGRFVFSLDTSVSTAYLQISSLKAEDTAVYFCARDYYGSSPYWGQGTLVTVSS

SEQ ID NO: 34749 - protein, 114 aa, synthetic construct; identical to SEQ ID NO: 33651
  source 1..114: note = Description of Artificial Sequence: Synthetic polypeptide; note = VL of XENP024263

SEQ ID NO: 34750 - protein, 5 aa, synthetic construct
  source 1..5: note = Description of Artificial Sequence: Synthetic peptide; note = XENP024263 vhCDR1
HYGMN

SEQ ID NO: 34751 - protein, 17 aa, synthetic construct
  source 1..17: note = Description of Artificial Sequence: Synthetic peptide; note = XENP024263 vhCDR2
WINTYTGEPYYADGFTG

SEQ ID NO: 34752 - protein, 8 aa, synthetic construct
  source 1..8: note = Description of Artificial Sequence: Synthetic peptide; note = XENP024263 vhCDR3
DYYGSSPY

SEQ ID NO: 34753 - protein, 16 aa, synthetic construct
  source 1..16: note = Description of Artificial Sequence: Synthetic peptide; note = XENP024263 vlCDR1
KSSQSIVHSNGNTYLE

SEQ ID NO: 34754 - protein, 7 aa, synthetic construct
  source 1..7: note = Description of Artificial Sequence: Synthetic peptide; note = XENP024263 vlCDR2
KVSNRFS

SEQ ID NO: 34755 - protein, 9 aa, synthetic construct
  source 1..9: note = Description of Artificial Sequence: Synthetic peptide; note = XENP024263 vlCDR3
FQGSHVPNT

SEQ ID NO: 34756 - protein, 251 aa, synthetic construct
  source 1..251: note = Description of Artificial Sequence: Synthetic polypeptide; note = XENP024264 1C11_H3.144_L3_scFv
QIQLVQSGSELKKPGASVKVSCKASGYTFTHYGMNWVRQAPGQGLEWMGWINTYTGEPNYADGFTGRFVFSLDTSVSTAYLQISSLKAEDTAVYFCARDYYGSSPYWGQGTLVTVSSGKPGSGKPGSGKPGSGKPGSDVLMTQSPDSLAVSLGERATINCKSSQSIVHSNGNTYLEWYQQKPGQSPKLLIYKVSNRFSGVPDRFSGSGSGTDFTLTISSLQAEDVAVYYCFQGSHVPNTFGGGTKVEIKGS

SEQ ID NO: 34757 - protein, 117 aa, synthetic construct
  source 1..117: note = Description of Artificial Sequence: Synthetic polypeptide; note = VH of XENP024264
QIQLVQSGSELKKPGASVKVSCKASGYTFTHYGMNWVRQAPGQGLEWMGWINTYTGEPNYADGFTGRFVFSLDTSVSTAYLQISSLKAEDTAVYFCARDYYGSSPYWGQGTLVTVSS

SEQ ID NO: 34758 - protein, 114 aa, synthetic construct; identical to SEQ ID NO: 33651
  source 1..114: note = Description of Artificial Sequence: Synthetic polypeptide; note = VL of XENP024264

SEQ ID NO: 34759 - protein, 5 aa, synthetic construct
  source 1..5: note = Description of Artificial Sequence: Synthetic peptide; note = XENP024264 vhCDR1
HYGMN

SEQ ID NO: 34760 - protein, 17 aa, synthetic construct
  source 1..17: note = Description of Artificial Sequence: Synthetic peptide; note = XENP024264 vhCDR2
WINTYTGEPNYADGFTG

SEQ ID NO: 34761 - protein, 8 aa, synthetic construct
  source 1..8: note = Description of Artificial Sequence: Synthetic peptide; note = XENP024264 vhCDR3
DYYGSSPY

SEQ ID NO: 34762 - protein, 16 aa, synthetic construct
  source 1..16: note = Description of Artificial Sequence: Synthetic peptide; note = XENP024264 vlCDR1
KSSQSIVHSNGNTYLE

SEQ ID NO: 34763 - protein, 7 aa, synthetic construct
  source 1..7: note = Description of Artificial Sequence: Synthetic peptide; note = XENP024264 vlCDR2
KVSNRFS

SEQ ID NO: 34764 - protein, 9 aa, synthetic construct
  source 1..9: note = Description of Artificial Sequence: Synthetic peptide; note = XENP024264 vlCDR3
FQGSHVPNT

SEQ ID NO: 34765 - protein, 251 aa, synthetic construct
  source 1..251: note = Description of Artificial Sequence: Synthetic polypeptide; note = XENP024265 1C11_H3.145_L3_scFv
QIQLVQSGSELKKPGASVKVSCKASGYTFTHYGMNWVRQAPGQGLEWMGWINTYTGEPTYSDGFTGRFVFSLDTSVSTAYLQISSLKAEDTAVYFCARDYYGSSPYWGQGTLVTVSSGKPGSGKPGSGKPGSGKPGSDVLMTQSPDSLAVSLGERATINCKSSQSIVHSNGNTYLEWYQQKPGQSPKLLIYKVSNRFSGVPDRFSGSGSGTDFTLTISSLQAEDVAVYYCFQGSHVPNTFGGGTKVEIKGS

SEQ ID NO: 34766 - protein, 117 aa, synthetic construct
  source 1..117: note = Description of Artificial Sequence: Synthetic polypeptide; note = VH of XENP024265
QIQLVQSGSELKKPGASVKVSCKASGYTFTHYGMNWVRQAPGQGLEWMGWINTYTGEPTYSDGFTGRFVFSLDTSVSTAYLQISSLKAEDTAVYFCARDYYGSSPYWGQGTLVTVSS

SEQ ID NO: 34767 - protein, 114 aa, synthetic construct; identical to SEQ ID NO: 33651
  source 1..114: note = Description of Artificial Sequence: Synthetic polypeptide; note = VL of XENP024265

SEQ ID NO: 34768 - protein, 5 aa, synthetic construct
  source 1..5: note = Description of Artificial Sequence: Synthetic peptide; note = XENP024265 vhCDR1
HYGMN

SEQ ID NO: 34769 - protein, 17 aa, synthetic construct
  source 1..17: note = Description of Artificial Sequence: Synthetic peptide; note = XENP024265 vhCDR2
WINTYTGEPTYSDGFTG

SEQ ID NO: 34770 - protein, 8 aa, synthetic construct
  source 1..8: note = Description of Artificial Sequence: Synthetic peptide; note = XENP024265 vhCDR3
DYYGSSPY

SEQ ID NO: 34771 - protein, 16 aa, synthetic construct
  source 1..16: note = Description of Artificial Sequence: Synthetic peptide; note = XENP024265 vlCDR1
KSSQSIVHSNGNTYLE

SEQ ID NO: 34772 - protein, 7 aa, synthetic construct
  source 1..7: note = Description of Artificial Sequence: Synthetic peptide; note = XENP024265 vlCDR2
KVSNRFS

SEQ ID NO: 34773 - protein, 9 aa, synthetic construct
  source 1..9: note = Description of Artificial Sequence: Synthetic peptide; note = XENP024265 vlCDR3
FQGSHVPNT

SEQ ID NO: 34774 - protein, 251 aa, synthetic construct
  source 1..251: note = Description of Artificial Sequence: Synthetic polypeptide; note = XENP024266 1C11_H3.146_L3_scFv
QIQLVQSGSELKKPGASVKVSCKASGYTFTHYGMNWVRQAPGQGLEWMGWINTYTGEPTYAPGFTGRFVFSLDTSVSTAYLQISSLKAEDTAVYFCARDYYGSSPYWGQGTLVTVSSGKPGSGKPGSGKPGSGKPGSDVLMTQSPDSLAVSLGERATINCKSSQSIVHSNGNTYLEWYQQKPGQSPKLLIYKVSNRFSGVPDRFSGSGSGTDFTLTISSLQAEDVAVYYCFQGSHVPNTFGGGTKVEIKGS

SEQ ID NO: 34775 - protein, 117 aa, synthetic construct
  source 1..117: note = Description of Artificial Sequence: Synthetic polypeptide; note = VH of XENP024266
QIQLVQSGSELKKPGASVKVSCKASGYTFTHYGMNWVRQAPGQGLEWMGWINTYTGEPTYAPGFTGRFVFSLDTSVSTAYLQISSLKAEDTAVYFCARDYYGSSPYWGQGTLVTVSS

SEQ ID NO: 34776 - protein, 114 aa, synthetic construct; identical to SEQ ID NO: 33651
  source 1..114: note = Description of Artificial Sequence: Synthetic polypeptide; note = VL of XENP024266

SEQ ID NO: 34777 - protein, 5 aa, synthetic construct
  source 1..5: note = Description of Artificial Sequence: Synthetic peptide; note = XENP024266 vhCDR1
HYGMN

SEQ ID NO: 34778 - protein, 17 aa, synthetic construct
  source 1..17: note = Description of Artificial Sequence: Synthetic peptide; note = XENP024266 vhCDR2
WINTYTGEPTYAPGFTG

SEQ ID NO: 34779 - protein, 8 aa, synthetic construct
  source 1..8: note = Description of Artificial Sequence: Synthetic peptide; note = XENP024266 vhCDR3
DYYGSSPY

SEQ ID NO: 34780 - protein, 16 aa, synthetic construct
  source 1..16: note = Description of Artificial Sequence: Synthetic peptide; note = XENP024266 vlCDR1
KSSQSIVHSNGNTYLE

SEQ ID NO: 34781 - protein, 7 aa, synthetic construct
  source 1..7: note = Description of Artificial Sequence: Synthetic peptide; note = XENP024266 vlCDR2
KVSNRFS

SEQ ID NO: 34782 - protein, 9 aa, synthetic construct
  source 1..9: note = Description of Artificial Sequence: Synthetic peptide; note = XENP024266 vlCDR3
FQGSHVPNT

SEQ ID NO: 34783 - protein, 251 aa, synthetic construct
  source 1..251: note = Description of Artificial Sequence: Synthetic polypeptide; note = XENP024267 1C11_H3.147_L3_scFv
QIQLVQSGSELKKPGASVKVSCKASGYTFTHYGMNWVRQAPGQGLEWMGWINTYTGEPTYATGFTGRFVFSLDTSVSTAYLQISSLKAEDTAVYFCARDYYGSSPYWGQGTLVTVSSGKPGSGKPGSGKPGSGKPGSDVLMTQSPDSLAVSLGERATINCKSSQSIVHSNGNTYLEWYQQKPGQSPKLLIYKVSNRFSGVPDRFSGSGSGTDFTLTISSLQAEDVAVYYCFQGSHVPNTFGGGTKVEIKGS

SEQ ID NO: 34784 - protein, 117 aa, synthetic construct
  source 1..117: note = Description of Artificial Sequence: Synthetic polypeptide; note = VH of XENP024267
QIQLVQSGSELKKPGASVKVSCKASGYTFTHYGMNWVRQAPGQGLEWMGWINTYTGEPTYATGFTGRFVFSLDTSVSTAYLQISSLKAEDTAVYFCARDYYGSSPYWGQGTLVTVSS

SEQ ID NO: 34785 - protein, 114 aa, synthetic construct; identical to SEQ ID NO: 33651
  source 1..114: note = Description of Artificial Sequence: Synthetic polypeptide; note = VL of XENP024267

SEQ ID NO: 34786 - protein, 5 aa, synthetic construct
  source 1..5: note = Description of Artificial Sequence: Synthetic peptide; note = XENP024267 vhCDR1
HYGMN

SEQ ID NO: 34787 - protein, 17 aa, synthetic construct
  source 1..17: note = Description of Artificial Sequence: Synthetic peptide; note = XENP024267 vhCDR2
WINTYTGEPTYATGFTG

SEQ ID NO: 34788 - protein, 8 aa, synthetic construct
  source 1..8: note = Description of Artificial Sequence: Synthetic peptide; note = XENP024267 vhCDR3
DYYGSSPY

SEQ ID NO: 34789 - protein, 16 aa, synthetic construct
  source 1..16: note = Description of Artificial Sequence: Synthetic peptide; note = XENP024267 vlCDR1
KSSQSIVHSNGNTYLE

SEQ ID NO: 34790 - protein, 7 aa, synthetic construct
  source 1..7: note = Description of Artificial Sequence: Synthetic peptide; note = XENP024267 vlCDR2
KVSNRFS

SEQ ID NO: 34791 - protein, 9 aa, synthetic construct
  source 1..9: note = Description of Artificial Sequence: Synthetic peptide; note = XENP024267 vlCDR3
FQGSHVPNT

SEQ ID NO: 34792 - protein, 251 aa, synthetic construct
  source 1..251: note = Description of Artificial Sequence: Synthetic polypeptide; note = XENP024268 1C11_H3.148_L3_scFv
QIQLVQSGSELKKPGASVKVSCKASGYTFTHYGMNWVRQAPGQGLEWMGWINTYTGEPTYAQKFTGRFVFSLDTSVSTAYLQISSLKAEDTAVYFCARDYYGSSPYWGQGTLVTVSSGKPGSGKPGSGKPGSGKPGSDVLMTQSPDSLAVSLGERATINCKSSQSIVHSNGNTYLEWYQQKPGQSPKLLIYKVSNRFSGVPDRFSGSGSGTDFTLTISSLQAEDVAVYYCFQGSHVPNTFGGGTKVEIKGS

SEQ ID NO: 34793 - protein, 117 aa, synthetic construct
  source 1..117: note = Description of Artificial Sequence: Synthetic polypeptide; note = VH of XENP024268
QIQLVQSGSELKKPGASVKVSCKASGYTFTHYGMNWVRQAPGQGLEWMGWINTYTGEPTYAQKFTGRFVFSLDTSVSTAYLQISSLKAEDTAVYFCARDYYGSSPYWGQGTLVTVSS

SEQ ID NO: 34794 - protein, 114 aa, synthetic construct; identical to SEQ ID NO: 33651
  source 1..114: note = Description of Artificial Sequence: Synthetic polypeptide; note = VL of XENP024268

SEQ ID NO: 34795 - protein, 5 aa, synthetic construct
  source 1..5: note = Description of Artificial Sequence: Synthetic peptide; note = XENP024268 vhCDR1
HYGMN

SEQ ID NO: 34796 - protein, 17 aa, synthetic construct
  source 1..17: note = Description of Artificial Sequence: Synthetic peptide; note = XENP024268 vhCDR2
WINTYTGEPTYAQKFTG

SEQ ID NO: 34797 - protein, 8 aa, synthetic construct
  source 1..8: note = Description of Artificial Sequence: Synthetic peptide; note = XENP024268 vhCDR3
DYYGSSPY

SEQ ID NO: 34798 - protein, 16 aa, synthetic construct
  source 1..16: note = Description of Artificial Sequence: Synthetic peptide; note = XENP024268 vlCDR1
KSSQSIVHSNGNTYLE

SEQ ID NO: 34799 - protein, 7 aa, synthetic construct
  source 1..7: note = Description of Artificial Sequence: Synthetic peptide; note = XENP024268 vlCDR2
KVSNRFS

SEQ ID NO: 34800 - protein, 9 aa, synthetic construct
  source 1..9: note = Description of Artificial Sequence: Synthetic peptide; note = XENP024268 vlCDR3
FQGSHVPNT

SEQ ID NO: 34801 - protein, 251 aa, synthetic construct
  source 1..251: note = Description of Artificial Sequence: Synthetic polypeptide; note = XENP024269 1C11_H3.149_L3_scFv
QIQLVQSGSELKKPGASVKVSCKASGYTFTHYGMNWVRQAPGQGLEWMGWINTYTGEPTYADGFTDRFVFSLDTSVSTAYLQISSLKAEDTAVYFCARDYYGSSPYWGQGTLVTVSSGKPGSGKPGSGKPGSGKPGSDVLMTQSPDSLAVSLGERATINCKSSQSIVHSNGNTYLEWYQQKPGQSPKLLIYKVSNRFSGVPDRFSGSGSGTDFTLTISSLQAEDVAVYYCFQGSHVPNTFGGGTKVEIKGS

SEQ ID NO: 34802 - protein, 117 aa, synthetic construct
  source 1..117: note = Description of Artificial Sequence: Synthetic polypeptide; note = VH of XENP024269
QIQLVQSGSELKKPGASVKVSCKASGYTFTHYGMNWVRQAPGQGLEWMGWINTYTGEPTYADGFTDRFVFSLDTSVSTAYLQISSLKAEDTAVYFCARDYYGSSPYWGQGTLVTVSS

SEQ ID NO: 34803 - protein, 114 aa, synthetic construct; identical to SEQ ID NO: 33651
  source 1..114: note = Description of Artificial Sequence: Synthetic polypeptide; note = VL of XENP024269

SEQ ID NO: 34804 - protein, 5 aa, synthetic construct
  source 1..5: note = Description of Artificial Sequence: Synthetic peptide; note = XENP024269 vhCDR1
HYGMN

SEQ ID NO: 34805 - protein, 17 aa, synthetic construct
  source 1..17: note = Description of Artificial Sequence: Synthetic peptide; note = XENP024269 vhCDR2
WINTYTGEPTYADGFTD

SEQ ID NO: 34806 - protein, 8 aa, synthetic construct
  source 1..8: note = Description of Artificial Sequence: Synthetic peptide; note = XENP024269 vhCDR3
DYYGSSPY

SEQ ID NO: 34807 - protein, 16 aa, synthetic construct
  source 1..16: note = Description of Artificial Sequence: Synthetic peptide; note = XENP024269 vlCDR1
KSSQSIVHSNGNTYLE

SEQ ID NO: 34808 - protein, 7 aa, synthetic construct
  source 1..7: note = Description of Artificial Sequence: Synthetic peptide; note = XENP024269 vlCDR2
KVSNRFS

SEQ ID NO: 34809 - protein, 9 aa, synthetic construct
  source 1..9: note = Description of Artificial Sequence: Synthetic peptide; note = XENP024269 vlCDR3
FQGSHVPNT

SEQ ID NO: 34810 - protein, 251 aa, synthetic construct
  source 1..251: note = Description of Artificial Sequence: Synthetic polypeptide; note = XENP024270 1C11_H3.150_L3_scFv
QIQLVQSGSELKKPGASVKVSCKASGYTFTHYGMNWVRQAPGQGLEWMGWINTYTGEPTYADGFTERFVFSLDTSVSTAYLQISSLKAEDTAVYFCARDYYGSSPYWGQGTLVTVSSGKPGSGKPGSGKPGSGKPGSDVLMTQSPDSLAVSLGERATINCKSSQSIVHSNGNTYLEWYQQKPGQSPKLLIYKVSNRFSGVPDRFSGSGSGTDFTLTISSLQAEDVAVYYCFQGSHVPNTFGGGTKVEIKGS

SEQ ID NO: 34811 - protein, 117 aa, synthetic construct
  source 1..117: note = Description of Artificial Sequence: Synthetic polypeptide; note = VH of XENP024270
QIQLVQSGSELKKPGASVKVSCKASGYTFTHYGMNWVRQAPGQGLEWMGWINTYTGEPTYADGFTERFVFSLDTSVSTAYLQISSLKAEDTAVYFCARDYYGSSPYWGQGTLVTVSS

SEQ ID NO: 34812 - protein, 114 aa, synthetic construct; identical to SEQ ID NO: 33651
  source 1..114: note = Description of Artificial Sequence: Synthetic polypeptide; note = VL of XENP024270

SEQ ID NO: 34813 - protein, 5 aa, synthetic construct
  source 1..5: note = Description of Artificial Sequence: Synthetic peptide; note = XENP024270 vhCDR1
HYGMN

SEQ ID NO: 34814 - protein, 17 aa, synthetic construct
  source 1..17: note = Description of Artificial Sequence: Synthetic peptide; note = XENP024270 vhCDR2
WINTYTGEPTYADGFTE

SEQ ID NO: 34815 - protein, 8 aa, synthetic construct
  source 1..8: note = Description of Artificial Sequence: Synthetic peptide; note = XENP024270 vhCDR3
DYYGSSPY

SEQ ID NO: 34816 - protein, 16 aa, synthetic construct
  source 1..16: note = Description of Artificial Sequence: Synthetic peptide; note = XENP024270 vlCDR1
KSSQSIVHSNGNTYLE

SEQ ID NO: 34817 - protein, 7 aa, synthetic construct
  source 1..7: note = Description of Artificial Sequence: Synthetic peptide; note = XENP024270 vlCDR2
KVSNRFS

SEQ ID NO: 34818 - protein, 9 aa, synthetic construct
  source 1..9: note = Description of Artificial Sequence: Synthetic peptide; note = XENP024270 vlCDR3
FQGSHVPNT

SEQ ID NO: 34819 - protein, 251 aa, synthetic construct
  source 1..251: note = Description of Artificial Sequence: Synthetic polypeptide; note = XENP024271 1C11_H3.151_L3_scFv
QIQLVQSGSELKKPGASVKVSCKASGYTFTHYGMNWVRQAPGQGLEWMGWINTYTGEPTYADGFTSRFVFSLDTSVSTAYLQISSLKAEDTAVYFCARDYYGSSPYWGQGTLVTVSSGKPGSGKPGSGKPGSGKPGSDVLMTQSPDSLAVSLGERATINCKSSQSIVHSNGNTYLEWYQQKPGQSPKLLIYKVSNRFSGVPDRFSGSGSGTDFTLTISSLQAEDVAVYYCFQGSHVPNTFGGGTKVEIKGS

SEQ ID NO: 34820 - protein, 117 aa, synthetic construct
  source 1..117: note = Description of Artificial Sequence: Synthetic polypeptide; note = VH of XENP024271
QIQLVQSGSELKKPGASVKVSCKASGYTFTHYGMNWVRQAPGQGLEWMGWINTYTGEPTYADGFTSRFVFSLDTSVSTAYLQISSLKAEDTAVYFCARDYYGSSPYWGQGTLVTVSS

SEQ ID NO: 34821 - protein, 114 aa, synthetic construct; identical to SEQ ID NO: 33651
  source 1..114: note = Description of Artificial Sequence: Synthetic polypeptide; note = VL of XENP024271

SEQ ID NO: 34822 - protein, 5 aa, synthetic construct
  source 1..5: note = Description of Artificial Sequence: Synthetic peptide; note = XENP024271 vhCDR1
HYGMN

SEQ ID NO: 34823 - protein, 17 aa, synthetic construct
  source 1..17: note = Description of Artificial Sequence: Synthetic peptide; note = XENP024271 vhCDR2
WINTYTGEPTYADGFTS

SEQ ID NO: 34824 - protein, 8 aa, synthetic construct
  source 1..8: note = Description of Artificial Sequence: Synthetic peptide; note = XENP024271 vhCDR3
DYYGSSPY

SEQ ID NO: 34825 - protein, 16 aa, synthetic construct
  source 1..16: note = Description of Artificial Sequence: Synthetic peptide; note = XENP024271 vlCDR1
KSSQSIVHSNGNTYLE

SEQ ID NO: 34826 - protein, 7 aa, synthetic construct
  source 1..7: note = Description of Artificial Sequence: Synthetic peptide; note = XENP024271 vlCDR2
KVSNRFS

SEQ ID NO: 34827 - protein, 9 aa, synthetic construct
  source 1..9: note = Description of Artificial Sequence: Synthetic peptide; note = XENP024271 vlCDR3
FQGSHVPNT

SEQ ID NO: 34828 - protein, 251 aa, synthetic construct
  source 1..251: note = Description of Artificial Sequence: Synthetic polypeptide; note = XENP024272 1C11_H3.152_L3_scFv
QIQLVQSGSELKKPGASVKVSCKASGYTFTHYGMNWVRQAPGQGLEWMGWINTYTGEPTYADGFTGRFVFTLDTSVSTAYLQISSLKAEDTAVYFCARDYYGSSPYWGQGTLVTVSSGKPGSGKPGSGKPGSGKPGSDVLMTQSPDSLAVSLGERATINCKSSQSIVHSNGNTYLEWYQQKPGQSPKLLIYKVSNRFSGVPDRFSGSGSGTDFTLTISSLQAEDVAVYYCFQGSHVPNTFGGGTKVEIKGS

SEQ ID NO: 34829 - protein, 117 aa, synthetic construct
  source 1..117: note = Description of Artificial Sequence: Synthetic polypeptide; note = VH of XENP024272
QIQLVQSGSELKKPGASVKVSCKASGYTFTHYGMNWVRQAPGQGLEWMGWINTYTGEPTYADGFTGRFVFTLDTSVSTAYLQISSLKAEDTAVYFCARDYYGSSPYWGQGTLVTVSS

SEQ ID NO: 34830 - protein, 114 aa, synthetic construct; identical to SEQ ID NO: 33651
  source 1..114: note = Description of Artificial Sequence: Synthetic polypeptide; note = VL of XENP024272

SEQ ID NO: 34831 - protein, 5 aa, synthetic construct
  source 1..5: note = Description of Artificial Sequence: Synthetic peptide; note = XENP024272 vhCDR1
HYGMN

SEQ ID NO: 34832 - protein, 17 aa, synthetic construct
  source 1..17: note = Description of Artificial Sequence: Synthetic peptide; note = XENP024272 vhCDR2
WINTYTGEPTYADGFTG

SEQ ID NO: 34833 - protein, 8 aa, synthetic construct
  source 1..8: note = Description of Artificial Sequence: Synthetic peptide; note = XENP024272 vhCDR3
DYYGSSPY

SEQ ID NO: 34834 - protein, 16 aa, synthetic construct
  source 1..16: note = Description of Artificial Sequence: Synthetic peptide; note = XENP024272 vlCDR1
KSSQSIVHSNGNTYLE

SEQ ID NO: 34835 - protein, 7 aa, synthetic construct
  source 1..7: note = Description of Artificial Sequence: Synthetic peptide; note = XENP024272 vlCDR2
KVSNRFS

SEQ ID NO: 34836 - protein, 9 aa, synthetic construct
  source 1..9: note = Description of Artificial Sequence: Synthetic peptide; note = XENP024272 vlCDR3
FQGSHVPNT

SEQ ID NO: 34837 - protein, 251 aa, synthetic construct
  source 1..251: note = Description of Artificial Sequence: Synthetic polypeptide; note = XENP024273 1C11_H3.153_L3_scFv
QIQLVQSGSELKKPGASVKVSCKASGYTFTHYGMNWVRQAPGQGLEWMGWINTYTGEPTYADGFTGRFVFSTDTSVSTAYLQISSLKAEDTAVYFCARDYYGSSPYWGQGTLVTVSSGKPGSGKPGSGKPGSGKPGSDVLMTQSPDSLAVSLGERATINCKSSQSIVHSNGNTYLEWYQQKPGQSPKLLIYKVSNRFSGVPDRFSGSGSGTDFTLTISSLQAEDVAVYYCFQGSHVPNTFGGGTKVEIKGS

SEQ ID NO: 34838 - protein, 117 aa, synthetic construct
  source 1..117: note = Description of Artificial Sequence: Synthetic polypeptide; note = VH of XENP024273
QIQLVQSGSELKKPGASVKVSCKASGYTFTHYGMNWVRQAPGQGLEWMGWINTYTGEPTYADGFTGRFVFSTDTSVSTAYLQISSLKAEDTAVYFCARDYYGSSPYWGQGTLVTVSS

SEQ ID NO: 34839 - protein, 114 aa, synthetic construct; identical to SEQ ID NO: 33651
  source 1..114: note = Description of Artificial Sequence: Synthetic polypeptide; note = VL of XENP024273

SEQ ID NO: 34840 - protein, 5 aa, synthetic construct
  source 1..5: note = Description of Artificial Sequence: Synthetic peptide; note = XENP024273 vhCDR1
HYGMN

SEQ ID NO: 34841 - protein, 17 aa, synthetic construct
  source 1..17: note = Description of Artificial Sequence: Synthetic peptide; note = XENP024273 vhCDR2
WINTYTGEPTYADGFTG

SEQ ID NO: 34842 - protein, 8 aa, synthetic construct
  source 1..8: note = Description of Artificial Sequence: Synthetic peptide; note = XENP024273 vhCDR3
DYYGSSPY

SEQ ID NO: 34843 - protein, 16 aa, synthetic construct
  source 1..16: note = Description of Artificial Sequence: Synthetic peptide; note = XENP024273 vlCDR1
KSSQSIVHSNGNTYLE

SEQ ID NO: 34844 - protein, 7 aa, synthetic construct
  source 1..7: note = Description of Artificial Sequence: Synthetic peptide; note = XENP024273 vlCDR2
KVSNRFS

SEQ ID NO: 34845 - protein, 9 aa, synthetic construct
  source 1..9: note = Description of Artificial Sequence: Synthetic peptide; note = XENP024273 vlCDR3
FQGSHVPNT

SEQ ID NO: 34846 - protein, 251 aa, synthetic construct
  source 1..251: note = Description of Artificial Sequence: Synthetic polypeptide; note = XENP024274 1C11_H3.154_L3_scFv
QIQLVQSGSELKKPGASVKVSCKASGYTFTHYGMNWVRQAPGQGLEWMGWINTYTGEPTYADGFTGRFVFSIDTSVSTAYLQISSLKAEDTAVYFCARDYYGSSPYWGQGTLVTVSSGKPGSGKPGSGKPGSGKPGSDVLMTQSPDSLAVSLGERATINCKSSQSIVHSNGNTYLEWYQQKPGQSPKLLIYKVSNRFSGVPDRFSGSGSGTDFTLTISSLQAEDVAVYYCFQGSHVPNTFGGGTKVEIKGS

SEQ ID NO: 34847 - protein, 117 aa, synthetic construct
  source 1..117: note = Description of Artificial Sequence: Synthetic polypeptide; note = VH of XENP024274
QIQLVQSGSELKKPGASVKVSCKASGYTFTHYGMNWVRQAPGQGLEWMGWINTYTGEPTYADGFTGRFVFSIDTSVSTAYLQISSLKAEDTAVYFCARDYYGSSPYWGQGTLVTVSS

SEQ ID NO: 34848 - protein, 114 aa, synthetic construct; identical to SEQ ID NO: 33651
  source 1..114: note = Description of Artificial Sequence: Synthetic polypeptide; note = VL of XENP024274

SEQ ID NO: 34849 - protein, 5 aa, synthetic construct
  source 1..5: note = Description of Artificial Sequence: Synthetic peptide; note = XENP024274 vhCDR1
HYGMN

SEQ ID NO: 34850 - protein, 17 aa, synthetic construct
  source 1..17: note = Description of Artificial Sequence: Synthetic peptide; note = XENP024274 vhCDR2
WINTYTGEPTYADGFTG

SEQ ID NO: 34851 - protein, 8 aa, synthetic construct
  source 1..8: note = Description of Artificial Sequence: Synthetic peptide; note = XENP024274 vhCDR3
DYYGSSPY

SEQ ID NO: 34852 - protein, 16 aa, synthetic construct
  source 1..16: note = Description of Artificial Sequence: Synthetic peptide; note = XENP024274 vlCDR1
KSSQSIVHSNGNTYLE

SEQ ID NO: 34853 - protein, 7 aa, synthetic construct
  source 1..7: note = Description of Artificial Sequence: Synthetic peptide; note = XENP024274 vlCDR2
KVSNRFS

SEQ ID NO: 34854 - protein, 9 aa, synthetic construct
  source 1..9: note = Description of Artificial Sequence: Synthetic peptide; note = XENP024274 vlCDR3
FQGSHVPNT

SEQ ID NO: 34855 - protein, 251 aa, synthetic construct
  source 1..251: note = Description of Artificial Sequence: Synthetic polypeptide; note = XENP024275 1C11_H3.155_L3_scFv
QIQLVQSGSELKKPGASVKVSCKASGYTFTHYGMNWVRQAPGQGLEWMGWINTYTGEPTYADGFTGRFVFSLDNSVSTAYLQISSLKAEDTAVYFCARDYYGSSPYWGQGTLVTVSSGKPGSGKPGSGKPGSGKPGSDVLMTQSPDSLAVSLGERATINCKSSQSIVHSNGNTYLEWYQQKPGQSPKLLIYKVSNRFSGVPDRFSGSGSGTDFTLTISSLQAEDVAVYYCFQGSHVPNTFGGGTKVEIKGS

SEQ ID NO: 34856 - protein, 117 aa, synthetic construct
  source 1..117: note = Description of Artificial Sequence: Synthetic polypeptide; note = VH of XENP024275
QIQLVQSGSELKKPGASVKVSCKASGYTFTHYGMNWVRQAPGQGLEWMGWINTYTGEPTYADGFTGRFVFSLDNSVSTAYLQISSLKAEDTAVYFCARDYYGSSPYWGQGTLVTVSS

SEQ ID NO: 34857 - protein, 114 aa, synthetic construct; identical to SEQ ID NO: 33651
  source 1..114: note = Description of Artificial Sequence: Synthetic polypeptide; note = VL of XENP024275

SEQ ID NO: 34858 - protein, 5 aa, synthetic construct
  source 1..5: note = Description of Artificial Sequence: Synthetic peptide; note = XENP024275 vhCDR1
HYGMN

SEQ ID NO: 34859 - protein, 17 aa, synthetic construct
  source 1..17: note = Description of Artificial Sequence: Synthetic peptide; note = XENP024275 vhCDR2
WINTYTGEPTYADGFTG

SEQ ID NO: 34860 - protein, 8 aa, synthetic construct
  source 1..8: note = Description of Artificial Sequence: Synthetic peptide; note = XENP024275 vhCDR3
DYYGSSPY

SEQ ID NO: 34861 - protein, 16 aa, synthetic construct
  source 1..16: note = Description of Artificial Sequence: Synthetic peptide; note = XENP024275 vlCDR1
KSSQSIVHSNGNTYLE

SEQ ID NO: 34862 - protein, 7 aa, synthetic construct
  source 1..7: note = Description of Artificial Sequence: Synthetic peptide; note = XENP024275 vlCDR2
KVSNRFS

SEQ ID NO: 34863 - protein, 9 aa, synthetic construct
  source 1..9: note = Description of Artificial Sequence: Synthetic peptide; note = XENP024275 vlCDR3
FQGSHVPNT

SEQ ID NO: 34864 - protein, 251 aa, synthetic construct
  source 1..251: note = Description of Artificial Sequence: Synthetic polypeptide; note = XENP024276 1C11_H3.156_L3_scFv
QIQLVQSGSELKKPGASVKVSCKASGYTFTHYGMNWVRQAPGQGLEWMGWINTYTGEPTYADGFTGRFVFSLDRSVSTAYLQISSLKAEDTAVYFCARDYYGSSPYWGQGTLVTVSSGKPGSGKPGSGKPGSGKPGSDVLMTQSPDSLAVSLGERATINCKSSQSIVHSNGNTYLEWYQQKPGQSPKLLIYKVSNRFSGVPDRFSGSGSGTDFTLTISSLQAEDVAVYYCFQGSHVPNTFGGGTKVEIKGS

SEQ ID NO: 34865 - protein, 117 aa, synthetic construct
  source 1..117: note = Description of Artificial Sequence: Synthetic polypeptide; note = VH of XENP024276
QIQLVQSGSELKKPGASVKVSCKASGYTFTHYGMNWVRQAPGQGLEWMGWINTYTGEPTYADGFTGRFVFSLDRSVSTAYLQISSLKAEDTAVYFCARDYYGSSPYWGQGTLVTVSS

SEQ ID NO: 34866 - protein, 114 aa, synthetic construct; identical to SEQ ID NO: 33651
  source 1..114: note = Description of Artificial Sequence: Synthetic polypeptide; note = VL of XENP024276

SEQ ID NO: 34867 - protein, 5 aa, synthetic construct
  source 1..5: note = Description of Artificial Sequence: Synthetic peptide; note = XENP024276 vhCDR1
HYGMN

SEQ ID NO: 34868 - protein, 17 aa, synthetic construct
  source 1..17: note = Description of Artificial Sequence: Synthetic peptide; note = XENP024276 vhCDR2
WINTYTGEPTYADGFTG

SEQ ID NO: 34869 - protein, 8 aa, synthetic construct
  source 1..8: note = Description of Artificial Sequence: Synthetic peptide; note = XENP024276 vhCDR3
DYYGSSPY

SEQ ID NO: 34870 - protein, 16 aa, synthetic construct
  source 1..16: note = Description of Artificial Sequence: Synthetic peptide; note = XENP024276 vlCDR1
KSSQSIVHSNGNTYLE

SEQ ID NO: 34871 - protein, 7 aa, synthetic construct
  source 1..7: note = Description of Artificial Sequence: Synthetic peptide; note = XENP024276 vlCDR2
KVSNRFS

SEQ ID NO: 34872 - protein, 9 aa, synthetic construct
  source 1..9: note = Description of Artificial Sequence: Synthetic peptide; note = XENP024276 vlCDR3
FQGSHVPNT

SEQ ID NO: 34873 - protein, 251 aa, synthetic construct
  source 1..251: note = Description of Artificial Sequence: Synthetic polypeptide; note = XENP024277 1C11_H3.157_L3_scFv
QIQLVQSGSELKKPGASVKVSCKASGYTFTHYGMNWVRQAPGQGLEWMGWINTYTGEPTYADGFTGRFVFSLDTAVSTAYLQISSLKAEDTAVYFCARDYYGSSPYWGQGTLVTVSSGKPGSGKPGSGKPGSGKPGSDVLMTQSPDSLAVSLGERATINCKSSQSIVHSNGNTYLEWYQQKPGQSPKLLIYKVSNRFSGVPDRFSGSGSGTDFTLTISSLQAEDVAVYYCFQGSHVPNTFGGGTKVEIKGS

SEQ ID NO: 34874 - protein, 117 aa, synthetic construct
  source 1..117: note = Description of Artificial Sequence: Synthetic polypeptide; note = VH of XENP024277
QIQLVQSGSELKKPGASVKVSCKASGYTFTHYGMNWVRQAPGQGLEWMGWINTYTGEPTYADGFTGRFVFSLDTAVSTAYLQISSLKAEDTAVYFCARDYYGSSPYWGQGTLVTVSS

SEQ ID NO: 34875 - protein, 114 aa, synthetic construct; identical to SEQ ID NO: 33651
  source 1..114: note = Description of Artificial Sequence: Synthetic polypeptide; note = VL of XENP024277

SEQ ID NO: 34876 - protein, 5 aa, synthetic construct
  source 1..5: note = Description of Artificial Sequence: Synthetic peptide; note = XENP024277 vhCDR1
HYGMN

SEQ ID NO: 34877 - protein, 17 aa, synthetic construct
  source 1..17: note = Description of Artificial Sequence: Synthetic peptide; note = XENP024277 vhCDR2
WINTYTGEPTYADGFTG

SEQ ID NO: 34878 - protein, 8 aa, synthetic construct
  source 1..8: note = Description of Artificial Sequence: Synthetic peptide; note = XENP024277 vhCDR3
DYYGSSPY

SEQ ID NO: 34879 - protein, 16 aa, synthetic construct
  source 1..16: note = Description of Artificial Sequence: Synthetic peptide; note = XENP024277 vlCDR1
KSSQSIVHSNGNTYLE

SEQ ID NO: 34880 - protein, 7 aa, synthetic construct
  source 1..7: note = Description of Artificial Sequence: Synthetic peptide; note = XENP024277 vlCDR2
KVSNRFS

SEQ ID NO: 34881 - protein, 9 aa, synthetic construct
  source 1..9: note = Description of Artificial Sequence: Synthetic peptide; note = XENP024277 vlCDR3
FQGSHVPNT

SEQ ID NO: 34882 - protein, 251 aa, synthetic construct
  source 1..251: note = Description of Artificial Sequence: Synthetic polypeptide; note = XENP024278 1C11_H3.158_L3_scFv
QIQLVQSGSELKKPGASVKVSCKASGYTFTHYGMNWVRQAPGQGLEWMGWINTYTGEPTYADGFTGRFVFSLDTSVNTAYLQISSLKAEDTAVYFCARDYYGSSPYWGQGTLVTVSSGKPGSGKPGSGKPGSGKPGSDVLMTQSPDSLAVSLGERATINCKSSQSIVHSNGNTYLEWYQQKPGQSPKLLIYKVSNRFSGVPDRFSGSGSGTDFTLTISSLQAEDVAVYYCFQGSHVPNTFGGGTKVEIKGS

SEQ ID NO: 34883 - protein, 117 aa, synthetic construct
  source 1..117: note = Description of Artificial Sequence: Synthetic polypeptide; note = VH of XENP024278
QIQLVQSGSELKKPGASVKVSCKASGYTFTHYGMNWVRQAPGQGLEWMGWINTYTGEPTYADGFTGRFVFSLDTSVNTAYLQISSLKAEDTAVYFCARDYYGSSPYWGQGTLVTVSS

SEQ ID NO: 34884 - protein, 114 aa, synthetic construct; identical to SEQ ID NO: 33651
  source 1..114: note = Description of Artificial Sequence: Synthetic polypeptide; note = VL of XENP024278

SEQ ID NO: 34885 - protein, 5 aa, synthetic construct
  source 1..5: note = Description of Artificial Sequence: Synthetic peptide; note = XENP024278 vhCDR1
HYGMN

SEQ ID NO: 34886 - protein, 17 aa, synthetic construct
  source 1..17: note = Description of Artificial Sequence: Synthetic peptide; note = XENP024278 vhCDR2
WINTYTGEPTYADGFTG

SEQ ID NO: 34887 - protein, 8 aa, synthetic construct
  source 1..8: note = Description of Artificial Sequence: Synthetic peptide; note = XENP024278 vhCDR3
DYYGSSPY

SEQ ID NO: 34888 - protein, 16 aa, synthetic construct
  source 1..16: note = Description of Artificial Sequence: Synthetic peptide; note = XENP024278 vlCDR1
KSSQSIVHSNGNTYLE

SEQ ID NO: 34889 - protein, 7 aa, synthetic construct
  source 1..7: note = Description of Artificial Sequence: Synthetic peptide; note = XENP024278 vlCDR2
KVSNRFS

SEQ ID NO: 34890 - protein, 9 aa, synthetic construct
  source 1..9: note = Description of Artificial Sequence: Synthetic peptide; note = XENP024278 vlCDR3
FQGSHVPNT

SEQ ID NO: 34891 - protein, 251 aa, synthetic construct
  source 1..251: note = Description of Artificial Sequence: Synthetic polypeptide; note = XENP024279 1C11_H3.159_L3_scFv
QIQLVQSGSELKKPGASVKVSCKASGYTFTHYGMNWVRQAPGQGLEWMGWINTYTGEPTYADGFTGRFVFSLDTSVDTAYLQISSLKAEDTAVYFCARDYYGSSPYWGQGTLVTVSSGKPGSGKPGSGKPGSGKPGSDVLMTQSPDSLAVSLGERATINCKSSQSIVHSNGNTYLEWYQQKPGQSPKLLIYKVSNRFSGVPDRFSGSGSGTDFTLTISSLQAEDVAVYYCFQGSHVPNTFGGGTKVEIKGS

SEQ ID NO: 34892 - protein, 117 aa, synthetic construct
  source 1..117: note = Description of Artificial Sequence: Synthetic polypeptide; note = VH of XENP024279
QIQLVQSGSELKKPGASVKVSCKASGYTFTHYGMNWVRQAPGQGLEWMGWINTYTGEPTYADGFTGRFVFSLDTSVDTAYLQISSLKAEDTAVYFCARDYYGSSPYWGQGTLVTVSS

SEQ ID NO: 34893 - protein, 114 aa, synthetic construct; identical to SEQ ID NO: 33651
  source 1..114: note = Description of Artificial Sequence: Synthetic polypeptide; note = VL of XENP024279

SEQ ID NO: 34894 - protein, 5 aa, synthetic construct
  source 1..5: note = Description of Artificial Sequence: Synthetic peptide; note = XENP024279 vhCDR1
HYGMN

SEQ ID NO: 34895 - protein, 17 aa, synthetic construct
  source 1..17: note = Description of Artificial Sequence: Synthetic peptide; note = XENP024279 vhCDR2
WINTYTGEPTYADGFTG

SEQ ID NO: 34896 - protein, 8 aa, synthetic construct
  source 1..8: note = Description of Artificial Sequence: Synthetic peptide; note = XENP024279 vhCDR3
DYYGSSPY

SEQ ID NO: 34897 - protein, 16 aa, synthetic construct
  source 1..16: note = Description of Artificial Sequence: Synthetic peptide; note = XENP024279 vlCDR1
KSSQSIVHSNGNTYLE

SEQ ID NO: 34898 - protein, 7 aa, synthetic construct
  source 1..7: note = Description of Artificial Sequence: Synthetic peptide; note = XENP024279 vlCDR2
KVSNRFS

SEQ ID NO: 34899 - protein, 9 aa, synthetic construct
  source 1..9: note = Description of Artificial Sequence: Synthetic peptide; note = XENP024279 vlCDR3
FQGSHVPNT

SEQ ID NO: 34900 - protein, 251 aa, synthetic construct
  source 1..251: note = Description of Artificial Sequence: Synthetic polypeptide; note = XENP024280 1C11_H3.160_L3_scFv
QIQLVQSGSELKKPGASVKVSCKASGYTFTHYGMNWVRQAPGQGLEWMGWINTYTGEPTYADGFTGRFVFSLDTSVSQAYLQISSLKAEDTAVYFCARDYYGSSPYWGQGTLVTVSSGKPGSGKPGSGKPGSGKPGSDVLMTQSPDSLAVSLGERATINCKSSQSIVHSNGNTYLEWYQQKPGQSPKLLIYKVSNRFSGVPDRFSGSGSGTDFTLTISSLQAEDVAVYYCFQGSHVPNTFGGGTKVEIKGS

SEQ ID NO: 34901 - protein, 117 aa, synthetic construct
  source 1..117: note = Description of Artificial Sequence: Synthetic polypeptide; note = VH of XENP024280
QIQLVQSGSELKKPGASVKVSCKASGYTFTHYGMNWVRQAPGQGLEWMGWINTYTGEPTYADGFTGRFVFSLDTSVSQAYLQISSLKAEDTAVYFCARDYYGSSPYWGQGTLVTVSS

SEQ ID NO: 34902 - protein, 114 aa, synthetic construct; identical to SEQ ID NO: 33651
  source 1..114: note = Description of Artificial Sequence: Synthetic polypeptide; note = VL of XENP024280

SEQ ID NO: 34903 - protein, 5 aa, synthetic construct
  source 1..5: note = Description of Artificial Sequence: Synthetic peptide; note = XENP024280 vhCDR1
HYGMN

SEQ ID NO: 34904 - protein, 17 aa, synthetic construct
  source 1..17: note = Description of Artificial Sequence: Synthetic peptide; note = XENP024280 vhCDR2
WINTYTGEPTYADGFTG

SEQ ID NO: 34905 - protein, 8 aa, synthetic construct
  source 1..8: note = Description of Artificial Sequence: Synthetic peptide; note = XENP024280 vhCDR3
DYYGSSPY

SEQ ID NO: 34906 - protein, 16 aa, synthetic construct
  source 1..16: note = Description of Artificial Sequence: Synthetic peptide; note = XENP024280 vlCDR1
KSSQSIVHSNGNTYLE

SEQ ID NO: 34907 - protein, 7 aa, synthetic construct
  source 1..7: note = Description of Artificial Sequence: Synthetic peptide; note = XENP024280 vlCDR2
KVSNRFS

SEQ ID NO: 34908 - protein, 9 aa, synthetic construct
  source 1..9: note = Description of Artificial Sequence: Synthetic peptide; note = XENP024280 vlCDR3
FQGSHVPNT

SEQ ID NO: 34909 - protein, 251 aa, synthetic construct
  source 1..251: note = Description of Artificial Sequence: Synthetic polypeptide; note = XENP024281 1C11_H3.161_L3_scFv
QIQLVQSGSELKKPGASVKVSCKASGYTFTHYGMNWVRQAPGQGLEWMGWINTYTGEPTYADGFTGRFVFSLDTSVSSAYLQISSLKAEDTAVYFCARDYYGSSPYWGQGTLVTVSSGKPGSGKPGSGKPGSGKPGSDVLMTQSPDSLAVSLGERATINCKSSQSIVHSNGNTYLEWYQQKPGQSPKLLIYKVSNRFSGVPDRFSGSGSGTDFTLTISSLQAEDVAVYYCFQGSHVPNTFGGGTKVEIKGS

SEQ ID NO: 34910 - protein, 117 aa, synthetic construct
  source 1..117: note = Description of Artificial Sequence: Synthetic polypeptide; note = VH of XENP024281
QIQLVQSGSELKKPGASVKVSCKASGYTFTHYGMNWVRQAPGQGLEWMGWINTYTGEPTYADGFTGRFVFSLDTSVSSAYLQISSLKAEDTAVYFCARDYYGSSPYWGQGTLVTVSS

SEQ ID NO: 34911 - protein, 114 aa, synthetic construct; identical to SEQ ID NO: 33651
  source 1..114: note = Description of Artificial Sequence: Synthetic polypeptide; note = VL of XENP024281

SEQ ID NO: 34912 - protein, 5 aa, synthetic construct
  source 1..5: note = Description of Artificial Sequence: Synthetic peptide; note = XENP024281 vhCDR1
HYGMN

SEQ ID NO: 34913 - protein, 17 aa, synthetic construct
  source 1..17: note = Description of Artificial Sequence: Synthetic peptide; note = XENP024281 vhCDR2
WINTYTGEPTYADGFTG

SEQ ID NO: 34914 - protein, 8 aa, synthetic construct
  source 1..8: note = Description of Artificial Sequence: Synthetic peptide; note = XENP024281 vhCDR3
DYYGSSPY

SEQ ID NO: 34915 - protein, 16 aa, synthetic construct
  source 1..16: note = Description of Artificial Sequence: Synthetic peptide; note = XENP024281 vlCDR1
KSSQSIVHSNGNTYLE

SEQ ID NO: 34916 - protein, 7 aa, synthetic construct
  source 1..7: note = Description of Artificial Sequence: Synthetic peptide; note = XENP024281 vlCDR2
KVSNRFS

SEQ ID NO: 34917 - protein, 9 aa, synthetic construct
  source 1..9: note = Description of Artificial Sequence: Synthetic peptide; note = XENP024281 vlCDR3
FQGSHVPNT

SEQ ID NO: 34918 - protein, 251 aa, synthetic construct
  source 1..251: note = Description of Artificial Sequence: Synthetic polypeptide; note = XENP024282 1C11_H3.162_L3_scFv
QIQLVQSGSELKKPGASVKVSCKASGYTFTHYGMNWVRQAPGQGLEWMGWINTYTGEPTYADGFTGRFVFSLDTSVSTLYLQISSLKAEDTAVYFCARDYYGSSPYWGQGTLVTVSSGKPGSGKPGSGKPGSGKPGSDVLMTQSPDSLAVSLGERATINCKSSQSIVHSNGNTYLEWYQQKPGQSPKLLIYKVSNRFSGVPDRFSGSGSGTDFTLTISSLQAEDVAVYYCFQGSHVPNTFGGGTKVEIKGS

SEQ ID NO: 34919 - protein, 117 aa, synthetic construct
  source 1..117: note = Description of Artificial Sequence: Synthetic polypeptide; note = VH of XENP024282
QIQLVQSGSELKKPGASVKVSCKASGYTFTHYGMNWVRQAPGQGLEWMGWINTYTGEPTYADGFTGRFVFSLDTSVSTLYLQISSLKAEDTAVYFCARDYYGSSPYWGQGTLVTVSS

SEQ ID NO: 34920 - protein, 114 aa, synthetic construct; identical to SEQ ID NO: 33651
  source 1..114: note = Description of Artificial Sequence: Synthetic polypeptide; note = VL of XENP024282

SEQ ID NO: 34921 - protein, 5 aa, synthetic construct
  source 1..5: note = Description of Artificial Sequence: Synthetic peptide; note = XENP024282 vhCDR1
HYGMN

SEQ ID NO: 34922 - protein, 17 aa, synthetic construct
  source 1..17: note = Description of Artificial Sequence: Synthetic peptide; note = XENP024282 vhCDR2
WINTYTGEPTYADGFTG

SEQ ID NO: 34923 - protein, 8 aa, synthetic construct
  source 1..8: note = Description of Artificial Sequence: Synthetic peptide; note = XENP024282 vhCDR3
DYYGSSPY

SEQ ID NO: 34924 - protein, 16 aa, synthetic construct
  source 1..16: note = Description of Artificial Sequence: Synthetic peptide; note = XENP024282 vlCDR1
KSSQSIVHSNGNTYLE

SEQ ID NO: 34925 - protein, 7 aa, synthetic construct
  source 1..7: note = Description of Artificial Sequence: Synthetic peptide; note = XENP024282 vlCDR2
KVSNRFS

SEQ ID NO: 34926 - protein, 9 aa, synthetic construct
  source 1..9: note = Description of Artificial Sequence: Synthetic peptide; note = XENP024282 vlCDR3
FQGSHVPNT

SEQ ID NO: 34927 - protein, 251 aa, synthetic construct
  source 1..251: note = Description of Artificial Sequence: Synthetic polypeptide; note = XENP024283 1C11_H3.164_L3_scFv
QIQLVQSGSELKKPGASVKVSCKASGYTFTHYGMNWVRQAPGQGLEWMGWINTYTGEPTYADGFTGRFVFSLDTSVSTAVLQISSLKAEDTAVYFCARDYYGSSPYWGQGTLVTVSSGKPGSGKPGSGKPGSGKPGSDVLMTQSPDSLAVSLGERATINCKSSQSIVHSNGNTYLEWYQQKPGQSPKLLIYKVSNRFSGVPDRFSGSGSGTDFTLTISSLQAEDVAVYYCFQGSHVPNTFGGGTKVEIKGS

SEQ ID NO: 34928 - protein, 117 aa, synthetic construct
  source 1..117: note = Description of Artificial Sequence: Synthetic polypeptide; note = VH of XENP024283
QIQLVQSGSELKKPGASVKVSCKASGYTFTHYGMNWVRQAPGQGLEWMGWINTYTGEPTYADGFTGRFVFSLDTSVSTAVLQISSLKAEDTAVYFCARDYYGSSPYWGQGTLVTVSS

SEQ ID NO: 34929 - protein, 114 aa, synthetic construct; identical to SEQ ID NO: 33651
  source 1..114: note = Description of Artificial Sequence: Synthetic polypeptide; note = VL of XENP024283

SEQ ID NO: 34930 - protein, 5 aa, synthetic construct
  source 1..5: note = Description of Artificial Sequence: Synthetic peptide; note = XENP024283 vhCDR1
HYGMN

SEQ ID NO: 34931 - protein, 17 aa, synthetic construct
  source 1..17: note = Description of Artificial Sequence: Synthetic peptide; note = XENP024283 vhCDR2
WINTYTGEPTYADGFTG

SEQ ID NO: 34932 - protein, 8 aa, synthetic construct
  source 1..8: note = Description of Artificial Sequence: Synthetic peptide; note = XENP024283 vhCDR3
DYYGSSPY

SEQ ID NO: 34933 - protein, 16 aa, synthetic construct
  source 1..16: note = Description of Artificial Sequence: Synthetic peptide; note = XENP024283 vlCDR1
KSSQSIVHSNGNTYLE

SEQ ID NO: 34934 - protein, 7 aa, synthetic construct
  source 1..7: note = Description of Artificial Sequence: Synthetic peptide; note = XENP024283 vlCDR2
KVSNRFS

SEQ ID NO: 34935 - protein, 9 aa, synthetic construct
  source 1..9: note = Description of Artificial Sequence: Synthetic peptide; note = XENP024283 vlCDR3
FQGSHVPNT

SEQ ID NO: 34936 - protein, 251 aa, synthetic construct
  source 1..251: note = Description of Artificial Sequence: Synthetic polypeptide; note = XENP024284 1C11_H3.165_L3_scFv
QIQLVQSGSELKKPGASVKVSCKASGYTFTHYGMNWVRQAPGQGLEWMGWINTYTGEPTYADGFTGRFVFSLDTSVSTASLQISSLKAEDTAVYFCARDYYGSSPYWGQGTLVTVSSGKPGSGKPGSGKPGSGKPGSDVLMTQSPDSLAVSLGERATINCKSSQSIVHSNGNTYLEWYQQKPGQSPKLLIYKVSNRFSGVPDRFSGSGSGTDFTLTISSLQAEDVAVYYCFQGSHVPNTFGGGTKVEIKGS

SEQ ID NO: 34937 - protein, 117 aa, synthetic construct
  source 1..117: note = Description of Artificial Sequence: Synthetic polypeptide; note = VH of XENP024284
QIQLVQSGSELKKPGASVKVSCKASGYTFTHYGMNWVRQAPGQGLEWMGWINTYTGEPTYADGFTGRFVFSLDTSVSTASLQISSLKAEDTAVYFCARDYYGSSPYWGQGTLVTVSS

SEQ ID NO: 34938 - protein, 114 aa, synthetic construct; identical to SEQ ID NO: 33651
  source 1..114: note = Description of Artificial Sequence: Synthetic polypeptide; note = VL of XENP024284

SEQ ID NO: 34939 - protein, 5 aa, synthetic construct
  source 1..5: note = Description of Artificial Sequence: Synthetic peptide; note = XENP024284 vhCDR1
HYGMN

SEQ ID NO: 34940 - protein, 17 aa, synthetic construct
  source 1..17: note = Description of Artificial Sequence: Synthetic peptide; note = XENP024284 vhCDR2
WINTYTGEPTYADGFTG

SEQ ID NO: 34941 - protein, 8 aa, synthetic construct
  source 1..8: note = Description of Artificial Sequence: Synthetic peptide; note = XENP024284 vhCDR3
DYYGSSPY

SEQ ID NO: 34942 - protein, 16 aa, synthetic construct
  source 1..16: note = Description of Artificial Sequence: Synthetic peptide; note = XENP024284 vlCDR1
KSSQSIVHSNGNTYLE

SEQ ID NO: 34943 - protein, 7 aa, synthetic construct
  source 1..7: note = Description of Artificial Sequence: Synthetic peptide; note = XENP024284 vlCDR2
KVSNRFS

SEQ ID NO: 34944 - protein, 9 aa, synthetic construct
  source 1..9: note = Description of Artificial Sequence: Synthetic peptide; note = XENP024284 vlCDR3
FQGSHVPNT

SEQ ID NO: 34945 - protein, 251 aa, synthetic construct
  source 1..251: note = Description of Artificial Sequence: Synthetic polypeptide; note = XENP024285 1C11_H3.166_L3_scFv
QIQLVQSGSELKKPGASVKVSCKASGYTFTHYGMNWVRQAPGQGLEWMGWINTYTGEPTYADGFTGRFVFSLDTSVSTAYLEISSLKAEDTAVYFCARDYYGSSPYWGQGTLVTVSSGKPGSGKPGSGKPGSGKPGSDVLMTQSPDSLAVSLGERATINCKSSQSIVHSNGNTYLEWYQQKPGQSPKLLIYKVSNRFSGVPDRFSGSGSGTDFTLTISSLQAEDVAVYYCFQGSHVPNTFGGGTKVEIKGS

SEQ ID NO: 34946 - protein, 117 aa, synthetic construct
  source 1..117: note = Description of Artificial Sequence: Synthetic polypeptide; note = VH of XENP024285
QIQLVQSGSELKKPGASVKVSCKASGYTFTHYGMNWVRQAPGQGLEWMGWINTYTGEPTYADGFTGRFVFSLDTSVSTAYLEISSLKAEDTAVYFCARDYYGSSPYWGQGTLVTVSS

SEQ ID NO: 34947 - protein, 114 aa, synthetic construct; identical to SEQ ID NO: 33651
  source 1..114: note = Description of Artificial Sequence: Synthetic polypeptide; note = VL of XENP024285

SEQ ID NO: 34948 - protein, 5 aa, synthetic construct
  source 1..5: note = Description of Artificial Sequence: Synthetic peptide; note = XENP024285 vhCDR1
HYGMN

SEQ ID NO: 34949 - protein, 17 aa, synthetic construct
  source 1..17: note = Description of Artificial Sequence: Synthetic peptide; note = XENP024285 vhCDR2
WINTYTGEPTYADGFTG

SEQ ID NO: 34950 - protein, 8 aa, synthetic construct
  source 1..8: note = Description of Artificial Sequence: Synthetic peptide; note = XENP024285 vhCDR3
DYYGSSPY

SEQ ID NO: 34951 - protein, 16 aa, synthetic construct
  source 1..16: note = Description of Artificial Sequence: Synthetic peptide; note = XENP024285 vlCDR1
KSSQSIVHSNGNTYLE

SEQ ID NO: 34952 - protein, 7 aa, synthetic construct
  source 1..7: note = Description of Artificial Sequence: Synthetic peptide; note = XENP024285 vlCDR2
KVSNRFS

SEQ ID NO: 34953 - protein, 9 aa, synthetic construct
  source 1..9: note = Description of Artificial Sequence: Synthetic peptide; note = XENP024285 vlCDR3
FQGSHVPNT

SEQ ID NO: 34954 - protein, 251 aa, synthetic construct
  source 1..251: note = Description of Artificial Sequence: Synthetic polypeptide; note = XENP024286 1C11_H3.167_L3_scFv
QIQLVQSGSELKKPGASVKVSCKASGYTFTHYGMNWVRQAPGQGLEWMGWINTYTGEPTYADGFTGRFVFSLDTSVSTAYLKISSLKAEDTAVYFCARDYYGSSPYWGQGTLVTVSSGKPGSGKPGSGKPGSGKPGSDVLMTQSPDSLAVSLGERATINCKSSQSIVHSNGNTYLEWYQQKPGQSPKLLIYKVSNRFSGVPDRFSGSGSGTDFTLTISSLQAEDVAVYYCFQGSHVPNTFGGGTKVEIKGS

SEQ ID NO: 34955 - protein, 117 aa, synthetic construct
  source 1..117: note = Description of Artificial Sequence: Synthetic polypeptide; note = VH of XENP024286
QIQLVQSGSELKKPGASVKVSCKASGYTFTHYGMNWVRQAPGQGLEWMGWINTYTGEPTYADGFTGRFVFSLDTSVSTAYLKISSLKAEDTAVYFCARDYYGSSPYWGQGTLVTVSS

SEQ ID NO: 34956 - protein, 114 aa, synthetic construct; identical to SEQ ID NO: 33651
  source 1..114: note = Description of Artificial Sequence: Synthetic polypeptide; note = VL of XENP024286

SEQ ID NO: 34957 - protein, 5 aa, synthetic construct
  source 1..5: note = Description of Artificial Sequence: Synthetic peptide; note = XENP024286 vhCDR1
HYGMN

SEQ ID NO: 34958 - protein, 17 aa, synthetic construct
  source 1..17: note = Description of Artificial Sequence: Synthetic peptide; note = XENP024286 vhCDR2
WINTYTGEPTYADGFTG

SEQ ID NO: 34959 - protein, 8 aa, synthetic construct
  source 1..8: note = Description of Artificial Sequence: Synthetic peptide; note = XENP024286 vhCDR3
DYYGSSPY

SEQ ID NO: 34960 - protein, 16 aa, synthetic construct
  source 1..16: note = Description of Artificial Sequence: Synthetic peptide; note = XENP024286 vlCDR1
KSSQSIVHSNGNTYLE

SEQ ID NO: 34961 - protein, 7 aa, synthetic construct
  source 1..7: note = Description of Artificial Sequence: Synthetic peptide; note = XENP024286 vlCDR2
KVSNRFS

SEQ ID NO: 34962 - protein, 9 aa, synthetic construct
  source 1..9: note = Description of Artificial Sequence: Synthetic peptide; note = XENP024286 vlCDR3
FQGSHVPNT

SEQ ID NO: 34963 - protein, 251 aa, synthetic construct
  source 1..251: note = Description of Artificial Sequence: Synthetic polypeptide; note = XENP024287 1C11_H3.168_L3_scFv
QIQLVQSGSELKKPGASVKVSCKASGYTFTHYGMNWVRQAPGQGLEWMGWINTYTGEPTYADGFTGRFVFSLDTSVSTAYLQINSLKAEDTAVYFCARDYYGSSPYWGQGTLVTVSSGKPGSGKPGSGKPGSGKPGSDVLMTQSPDSLAVSLGERATINCKSSQSIVHSNGNTYLEWYQQKPGQSPKLLIYKVSNRFSGVPDRFSGSGSGTDFTLTISSLQAEDVAVYYCFQGSHVPNTFGGGTKVEIKGS

SEQ ID NO: 34964 - protein, 117 aa, synthetic construct
  source 1..117: note = Description of Artificial Sequence: Synthetic polypeptide; note = VH of XENP024287
QIQLVQSGSELKKPGASVKVSCKASGYTFTHYGMNWVRQAPGQGLEWMGWINTYTGEPTYADGFTGRFVFSLDTSVSTAYLQINSLKAEDTAVYFCARDYYGSSPYWGQGTLVTVSS

SEQ ID NO: 34965 - protein, 114 aa, synthetic construct; identical to SEQ ID NO: 33651
  source 1..114: note = Description of Artificial Sequence: Synthetic polypeptide; note = VL of XENP024287

SEQ ID NO: 34966 - protein, 5 aa, synthetic construct
  source 1..5: note = Description of Artificial Sequence: Synthetic peptide; note = XENP024287 vhCDR1
HYGMN

SEQ ID NO: 34967 - protein, 17 aa, synthetic construct
  source 1..17: note = Description of Artificial Sequence: Synthetic peptide; note = XENP024287 vhCDR2
WINTYTGEPTYADGFTG

SEQ ID NO: 34968 - protein, 8 aa, synthetic construct
  source 1..8: note = Description of Artificial Sequence: Synthetic peptide; note = XENP024287 vhCDR3
DYYGSSPY

SEQ ID NO: 34969 - protein, 16 aa, synthetic construct
  source 1..16: note = Description of Artificial Sequence: Synthetic peptide; note = XENP024287 vlCDR1
KSSQSIVHSNGNTYLE

SEQ ID NO: 34970 - protein, 7 aa, synthetic construct
  source 1..7: note = Description of Artificial Sequence: Synthetic peptide; note = XENP024287 vlCDR2
KVSNRFS

SEQ ID NO: 34971 - protein, 9 aa, synthetic construct
  source 1..9: note = Description of Artificial Sequence: Synthetic peptide; note = XENP024287 vlCDR3
FQGSHVPNT

SEQ ID NO: 34972 - protein, 251 aa, synthetic construct
  source 1..251: note = Description of Artificial Sequence: Synthetic polypeptide; note = XENP024288 1C11_H3.169_L3_scFv
QIQLVQSGSELKKPGASVKVSCKASGYTFTHYGMNWVRQAPGQGLEWMGWINTYTGEPTYADGFTGRFVFSLDTSVSTAYLQISSVKAEDTAVYFCARDYYGSSPYWGQGTLVTVSSGKPGSGKPGSGKPGSGKPGSDVLMTQSPDSLAVSLGERATINCKSSQSIVHSNGNTYLEWYQQKPGQSPKLLIYKVSNRFSGVPDRFSGSGSGTDFTLTISSLQAEDVAVYYCFQGSHVPNTFGGGTKVEIKGS

SEQ ID NO: 34973 - protein, 117 aa, synthetic construct
  source 1..117: note = Description of Artificial Sequence: Synthetic polypeptide; note = VH of XENP024288
QIQLVQSGSELKKPGASVKVSCKASGYTFTHYGMNWVRQAPGQGLEWMGWINTYTGEPTYADGFTGRFVFSLDTSVSTAYLQISSVKAEDTAVYFCARDYYGSSPYWGQGTLVTVSS

SEQ ID NO: 34974 - protein, 114 aa, synthetic construct; identical to SEQ ID NO: 33651
  source 1..114: note = Description of Artificial Sequence: Synthetic polypeptide; note = VL of XENP024288

SEQ ID NO: 34975 - protein, 5 aa, synthetic construct
  source 1..5: note = Description of Artificial Sequence: Synthetic peptide; note = XENP024288 vhCDR1
HYGMN

SEQ ID NO: 34976 - protein, 17 aa, synthetic construct
  source 1..17: note = Description of Artificial Sequence: Synthetic peptide; note = XENP024288 vhCDR2
WINTYTGEPTYADGFTG

SEQ ID NO: 34977 - protein, 8 aa, synthetic construct
  source 1..8: note = Description of Artificial Sequence: Synthetic peptide; note = XENP024288 vhCDR3
DYYGSSPY

SEQ ID NO: 34978 - protein, 16 aa, synthetic construct
  source 1..16: note = Description of Artificial Sequence: Synthetic peptide; note = XENP024288 vlCDR1
KSSQSIVHSNGNTYLE

SEQ ID NO: 34979 - protein, 7 aa, synthetic construct
  source 1..7: note = Description of Artificial Sequence: Synthetic peptide; note = XENP024288 vlCDR2
KVSNRFS

SEQ ID NO: 34980 - protein, 9 aa, synthetic construct
  source 1..9: note = Description of Artificial Sequence: Synthetic peptide; note = XENP024288 vlCDR3
FQGSHVPNT

SEQ ID NO: 34981 - protein, 251 aa, synthetic construct
  source 1..251: note = Description of Artificial Sequence: Synthetic polypeptide; note = XENP024289 1C11_H3.170_L3_scFv
QIQLVQSGSELKKPGASVKVSCKASGYTFTHYGMNWVRQAPGQGLEWMGWINTYTGEPTYADGFTGRFVFSLDTSVSTAYLQISSMKAEDTAVYFCARDYYGSSPYWGQGTLVTVSSGKPGSGKPGSGKPGSGKPGSDVLMTQSPDSLAVSLGERATINCKSSQSIVHSNGNTYLEWYQQKPGQSPKLLIYKVSNRFSGVPDRFSGSGSGTDFTLTISSLQAEDVAVYYCFQGSHVPNTFGGGTKVEIKGS

SEQ ID NO: 34982 - protein, 117 aa, synthetic construct
  source 1..117: note = Description of Artificial Sequence: Synthetic polypeptide; note = VH of XENP024289
QIQLVQSGSELKKPGASVKVSCKASGYTFTHYGMNWVRQAPGQGLEWMGWINTYTGEPTYADGFTGRFVFSLDTSVSTAYLQISSMKAEDTAVYFCARDYYGSSPYWGQGTLVTVSS

SEQ ID NO: 34983 - protein, 114 aa, synthetic construct; identical to SEQ ID NO: 33651
  source 1..114: note = Description of Artificial Sequence: Synthetic polypeptide; note = VL of XENP024289

SEQ ID NO: 34984 - protein, 5 aa, synthetic construct
  source 1..5: note = Description of Artificial Sequence: Synthetic peptide; note = XENP024289 vhCDR1
HYGMN

SEQ ID NO: 34985 - protein, 17 aa, synthetic construct
  source 1..17: note = Description of Artificial Sequence: Synthetic peptide; note = XENP024289 vhCDR2
WINTYTGEPTYADGFTG

SEQ ID NO: 34986 - protein, 8 aa, synthetic construct
  source 1..8: note = Description of Artificial Sequence: Synthetic peptide; note = XENP024289 vhCDR3
DYYGSSPY

SEQ ID NO: 34987 - protein, 16 aa, synthetic construct
  source 1..16: note = Description of Artificial Sequence: Synthetic peptide; note = XENP024289 vlCDR1
KSSQSIVHSNGNTYLE

SEQ ID NO: 34988 - protein, 7 aa, synthetic construct
  source 1..7: note = Description of Artificial Sequence: Synthetic peptide; note = XENP024289 vlCDR2
KVSNRFS

SEQ ID NO: 34989 - protein, 9 aa, synthetic construct
  source 1..9: note = Description of Artificial Sequence: Synthetic peptide; note = XENP024289 vlCDR3
FQGSHVPNT

SEQ ID NO: 34990 - protein, 251 aa, synthetic construct
  source 1..251: note = Description of Artificial Sequence: Synthetic polypeptide; note = XENP024290 1C11_H3.171_L3_scFv
QIQLVQSGSELKKPGASVKVSCKASGYTFTHYGMNWVRQAPGQGLEWMGWINTYTGEPTYADGFTGRFVFSLDTSVSTAYLQISSLKSEDTAVYFCARDYYGSSPYWGQGTLVTVSSGKPGSGKPGSGKPGSGKPGSDVLMTQSPDSLAVSLGERATINCKSSQSIVHSNGNTYLEWYQQKPGQSPKLLIYKVSNRFSGVPDRFSGSGSGTDFTLTISSLQAEDVAVYYCFQGSHVPNTFGGGTKVEIKGS

SEQ ID NO: 34991 - protein, 117 aa, synthetic construct
  source 1..117: note = Description of Artificial Sequence: Synthetic polypeptide; note = VH of XENP024290
QIQLVQSGSELKKPGASVKVSCKASGYTFTHYGMNWVRQAPGQGLEWMGWINTYTGEPTYADGFTGRFVFSLDTSVSTAYLQISSLKSEDTAVYFCARDYYGSSPYWGQGTLVTVSS

SEQ ID NO: 34992 - protein, 114 aa, synthetic construct; identical to SEQ ID NO: 33651
  source 1..114: note = Description of Artificial Sequence: Synthetic polypeptide; note = VL of XENP024290

SEQ ID NO: 34993 - protein, 5 aa, synthetic construct
  source 1..5: note = Description of Artificial Sequence: Synthetic peptide; note = XENP024290 vhCDR1
HYGMN

SEQ ID NO: 34994 - protein, 17 aa, synthetic construct
  source 1..17: note = Description of Artificial Sequence: Synthetic peptide; note = XENP024290 vhCDR2
WINTYTGEPTYADGFTG

SEQ ID NO: 34995 - protein, 8 aa, synthetic construct
  source 1..8: note = Description of Artificial Sequence: Synthetic peptide; note = XENP024290 vhCDR3
DYYGSSPY

SEQ ID NO: 34996 - protein, 16 aa, synthetic construct
  source 1..16: note = Description of Artificial Sequence: Synthetic peptide; note = XENP024290 vlCDR1
KSSQSIVHSNGNTYLE

SEQ ID NO: 34997 - protein, 7 aa, synthetic construct
  source 1..7: note = Description of Artificial Sequence: Synthetic peptide; note = XENP024290 vlCDR2
KVSNRFS

SEQ ID NO: 34998 - protein, 9 aa, synthetic construct
  source 1..9: note = Description of Artificial Sequence: Synthetic peptide; note = XENP024290 vlCDR3
FQGSHVPNT

SEQ ID NO: 34999 - protein, 251 aa, synthetic construct
  source 1..251: note = Description of Artificial Sequence: Synthetic polypeptide; note = XENP024291 1C11_H3.172_L3_scFv
QIQLVQSGSELKKPGASVKVSCKASGYTFTHYGMNWVRQAPGQGLEWMGWINTYTGEPTYADGFTGRFVFSLDTSVSTAYLQISSLKPEDTAVYFCARDYYGSSPYWGQGTLVTVSSGKPGSGKPGSGKPGSGKPGSDVLMTQSPDSLAVSLGERATINCKSSQSIVHSNGNTYLEWYQQKPGQSPKLLIYKVSNRFSGVPDRFSGSGSGTDFTLTISSLQAEDVAVYYCFQGSHVPNTFGGGTKVEIKGS

SEQ ID NO: 35000 - protein, 117 aa, synthetic construct
  source 1..117: note = Description of Artificial Sequence: Synthetic polypeptide; note = VH of XENP024291
QIQLVQSGSELKKPGASVKVSCKASGYTFTHYGMNWVRQAPGQGLEWMGWINTYTGEPTYADGFTGRFVFSLDTSVSTAYLQISSLKPEDTAVYFCARDYYGSSPYWGQGTLVTVSS

SEQ ID NO: 35001 - protein, 114 aa, synthetic construct; identical to SEQ ID NO: 33651
  source 1..114: note = Description of Artificial Sequence: Synthetic polypeptide; note = VL of XENP024291

SEQ ID NO: 35002 - protein, 5 aa, synthetic construct
  source 1..5: note = Description of Artificial Sequence: Synthetic peptide; note = XENP024291 vhCDR1
HYGMN

SEQ ID NO: 35003 - protein, 17 aa, synthetic construct
  source 1..17: note = Description of Artificial Sequence: Synthetic peptide; note = XENP024291 vhCDR2
WINTYTGEPTYADGFTG

SEQ ID NO: 35004 - protein, 8 aa, synthetic construct
  source 1..8: note = Description of Artificial Sequence: Synthetic peptide; note = XENP024291 vhCDR3
DYYGSSPY

SEQ ID NO: 35005 - protein, 16 aa, synthetic construct
  source 1..16: note = Description of Artificial Sequence: Synthetic peptide; note = XENP024291 vlCDR1
KSSQSIVHSNGNTYLE

SEQ ID NO: 35006 - protein, 7 aa, synthetic construct
  source 1..7: note = Description of Artificial Sequence: Synthetic peptide; note = XENP024291 vlCDR2
KVSNRFS

SEQ ID NO: 35007 - protein, 9 aa, synthetic construct
  source 1..9: note = Description of Artificial Sequence: Synthetic peptide; note = XENP024291 vlCDR3
FQGSHVPNT

SEQ ID NO: 35008 - protein, 251 aa, synthetic construct
  source 1..251: note = Description of Artificial Sequence: Synthetic polypeptide; note = XENP024292 1C11_H3.173_L3_scFv
QIQLVQSGSELKKPGASVKVSCKASGYTFTHYGMNWVRQAPGQGLEWMGWINTYTGEPTYADGFTGRFVFSLDTSVSTAYLQISSLKADDTAVYFCARDYYGSSPYWGQGTLVTVSSGKPGSGKPGSGKPGSGKPGSDVLMTQSPDSLAVSLGERATINCKSSQSIVHSNGNTYLEWYQQKPGQSPKLLIYKVSNRFSGVPDRFSGSGSGTDFTLTISSLQAEDVAVYYCFQGSHVPNTFGGGTKVEIKGS

SEQ ID NO: 35009 - protein, 117 aa, synthetic construct
  source 1..117: note = Description of Artificial Sequence: Synthetic polypeptide; note = VH of XENP024292
QIQLVQSGSELKKPGASVKVSCKASGYTFTHYGMNWVRQAPGQGLEWMGWINTYTGEPTYADGFTGRFVFSLDTSVSTAYLQISSLKADDTAVYFCARDYYGSSPYWGQGTLVTVSS

SEQ ID NO: 35010 - protein, 114 aa, synthetic construct; identical to SEQ ID NO: 33651
  source 1..114: note = Description of Artificial Sequence: Synthetic polypeptide; note = VL of XENP024292

SEQ ID NO: 35011 - protein, 5 aa, synthetic construct
  source 1..5: note = Description of Artificial Sequence: Synthetic peptide; note = XENP024292 vhCDR1
HYGMN

SEQ ID NO: 35012 - protein, 17 aa, synthetic construct
  source 1..17: note = Description of Artificial Sequence: Synthetic peptide; note = XENP024292 vhCDR2
WINTYTGEPTYADGFTG

SEQ ID NO: 35013 - protein, 8 aa, synthetic construct
  source 1..8: note = Description of Artificial Sequence: Synthetic peptide; note = XENP024292 vhCDR3
DYYGSSPY

SEQ ID NO: 35014 - protein, 16 aa, synthetic construct
  source 1..16: note = Description of Artificial Sequence: Synthetic peptide; note = XENP024292 vlCDR1
KSSQSIVHSNGNTYLE

SEQ ID NO: 35015 - protein, 7 aa, synthetic construct
  source 1..7: note = Description of Artificial Sequence: Synthetic peptide; note = XENP024292 vlCDR2
KVSNRFS

SEQ ID NO: 35016 - protein, 9 aa, synthetic construct
  source 1..9: note = Description of Artificial Sequence: Synthetic peptide; note = XENP024292 vlCDR3
FQGSHVPNT

SEQ ID NO: 35017 - protein, 251 aa, synthetic construct
  source 1..251: note = Description of Artificial Sequence: Synthetic polypeptide; note = XENP024293 1C11_H3.174_L3_scFv
QIQLVQSGSELKKPGASVKVSCKASGYTFTHYGMNWVRQAPGQGLEWMGWINTYTGEPTYADGFTGRFVFSLDTSVSTAYLQISSLKAADTAVYFCARDYYGSSPYWGQGTLVTVSSGKPGSGKPGSGKPGSGKPGSDVLMTQSPDSLAVSLGERATINCKSSQSIVHSNGNTYLEWYQQKPGQSPKLLIYKVSNRFSGVPDRFSGSGSGTDFTLTISSLQAEDVAVYYCFQGSHVPNTFGGGTKVEIKGS

SEQ ID NO: 35018 - protein, 117 aa, synthetic construct
  source 1..117: note = Description of Artificial Sequence: Synthetic polypeptide; note = VH of XENP024293
QIQLVQSGSELKKPGASVKVSCKASGYTFTHYGMNWVRQAPGQGLEWMGWINTYTGEPTYADGFTGRFVFSLDTSVSTAYLQISSLKAADTAVYFCARDYYGSSPYWGQGTLVTVSS

SEQ ID NO: 35019 - protein, 114 aa, synthetic construct; identical to SEQ ID NO: 33651
  source 1..114: note = Description of Artificial Sequence: Synthetic polypeptide; note = VL of XENP024293

SEQ ID NO: 35020 - protein, 5 aa, synthetic construct
  source 1..5: note = Description of Artificial Sequence: Synthetic peptide; note = XENP024293 vhCDR1
HYGMN

SEQ ID NO: 35021 - protein, 17 aa, synthetic construct
  source 1..17: note = Description of Artificial Sequence: Synthetic peptide; note = XENP024293 vhCDR2
WINTYTGEPTYADGFTG

SEQ ID NO: 35022 - protein, 8 aa, synthetic construct
  source 1..8: note = Description of Artificial Sequence: Synthetic peptide; note = XENP024293 vhCDR3
DYYGSSPY

SEQ ID NO: 35023 - protein, 16 aa, synthetic construct
  source 1..16: note = Description of Artificial Sequence: Synthetic peptide; note = XENP024293 vlCDR1
KSSQSIVHSNGNTYLE

SEQ ID NO: 35024 - protein, 7 aa, synthetic construct
  source 1..7: note = Description of Artificial Sequence: Synthetic peptide; note = XENP024293 vlCDR2
KVSNRFS

SEQ ID NO: 35025 - protein, 9 aa, synthetic construct
  source 1..9: note = Description of Artificial Sequence: Synthetic peptide; note = XENP024293 vlCDR3
FQGSHVPNT

SEQ ID NO: 35026 - protein, 251 aa, synthetic construct
  source 1..251: note = Description of Artificial Sequence: Synthetic polypeptide; note = XENP024372 1C11_H3_L3.86_scFv
QIQLVQSGSELKKPGASVKVSCKASGYTFTHYGMNWVRQAPGQGLEWMGWINTYTGEPTYADGFTGRFVFSLDTSVSTAYLQISSLKAEDTAVYFCARDYYGSSPYWGQGTLVTVSSGKPGSGKPGSGKPGSGKPGSDVLMTQSPDSLAVSLGERATINCKSSQSIVHSNGNTYLEWYQQKPGQSPKLLIYKVSNRFTGVPDRFSGSGSGTDFTLTISSVQAEDVATYYCFQGSHVPNTFGQGTKVEIKGS

SEQ ID NO: 35027 - protein, 117 aa, synthetic construct; identical to SEQ ID NO: 33034
  source 1..117: note = Description of Artificial Sequence: Synthetic polypeptide; note = VH of XENP024372

SEQ ID NO: 35028 - protein, 114 aa, synthetic construct
  source 1..114: note = Description of Artificial Sequence: Synthetic polypeptide; note = VL of XENP024372
DVLMTQSPDSLAVSLGERATINCKSSQSIVHSNGNTYLEWYQQKPGQSPKLLIYKVSNRFTGVPDRFSGSGSGTDFTLTISSVQAEDVATYYCFQGSHVPNTFGQGTKVEIKGS

SEQ ID NO: 35029 - protein, 5 aa, synthetic construct
  source 1..5: note = Description of Artificial Sequence: Synthetic peptide; note = XENP024372 vhCDR1
HYGMN

SEQ ID NO: 35030 - protein, 17 aa, synthetic construct
  source 1..17: note = Description of Artificial Sequence: Synthetic peptide; note = XENP024372 vhCDR2
WINTYTGEPTYADGFTG

SEQ ID NO: 35031 - protein, 8 aa, synthetic construct
  source 1..8: note = Description of Artificial Sequence: Synthetic peptide; note = XENP024372 vhCDR3
DYYGSSPY

SEQ ID NO: 35032 - protein, 16 aa, synthetic construct
  source 1..16: note = Description of Artificial Sequence: Synthetic peptide; note = XENP024372 vlCDR1
KSSQSIVHSNGNTYLE

SEQ ID NO: 35033 - protein, 7 aa, synthetic construct
  source 1..7: note = Description of Artificial Sequence: Synthetic peptide; note = XENP024372 vlCDR2
KVSNRFT

SEQ ID NO: 35034 - protein, 9 aa, synthetic construct
  source 1..9: note = Description of Artificial Sequence: Synthetic peptide; note = XENP024372 vlCDR3
FQGSHVPNT

SEQ ID NO: 35035 - protein, 251 aa, synthetic construct
  source 1..251: note = Description of Artificial Sequence: Synthetic polypeptide; note = XENP024373 1C11_H3_L3.87_scFv
QIQLVQSGSELKKPGASVKVSCKASGYTFTHYGMNWVRQAPGQGLEWMGWINTYTGEPTYADGFTGRFVFSLDTSVSTAYLQISSLKAEDTAVYFCARDYYGSSPYWGQGTLVTVSSGKPGSGKPGSGKPGSGKPGSDVVMTQSPDSLAVSLGERVTINCKASQSIVHSNGNTYLEWYQQKPGQPPKLLIYKVSNRFSGVPDRFSGSGSGTDFTLTISSLQAEDVAVYYCFQGSHVPNTFGGGTKVEIKGS

SEQ ID NO: 35036 - protein, 117 aa, synthetic construct; identical to SEQ ID NO: 33034
  source 1..117: note = Description of Artificial Sequence: Synthetic polypeptide; note = VH of XENP024373

SEQ ID NO: 35037 - protein, 114 aa, synthetic construct
  source 1..114: note = Description of Artificial Sequence: Synthetic polypeptide; note = VL of XENP024373
DVVMTQSPDSLAVSLGERVTINCKASQSIVHSNGNTYLEWYQQKPGQPPKLLIYKVSNRFSGVPDRFSGSGSGTDFTLTISSLQAEDVAVYYCFQGSHVPNTFGGGTKVEIKGS

SEQ ID NO: 35038 - protein, 5 aa, synthetic construct
  source 1..5: note = Description of Artificial Sequence: Synthetic peptide; note = XENP024373 vhCDR1
HYGMN

SEQ ID NO: 35039 - protein, 17 aa, synthetic construct
  source 1..17: note = Description of Artificial Sequence: Synthetic peptide; note = XENP024373 vhCDR2
WINTYTGEPTYADGFTG

SEQ ID NO: 35040 - protein, 8 aa, synthetic construct
  source 1..8: note = Description of Artificial Sequence: Synthetic peptide; note = XENP024373 vhCDR3
DYYGSSPY

SEQ ID NO: 35041 - protein, 16 aa, synthetic construct
  source 1..16: note = Description of Artificial Sequence: Synthetic peptide; note = XENP024373 vlCDR1
KASQSIVHSNGNTYLE

SEQ ID NO: 35042 - protein, 7 aa, synthetic construct
  source 1..7: note = Description of Artificial Sequence: Synthetic peptide; note = XENP024373 vlCDR2
KVSNRFS

SEQ ID NO: 35043 - protein, 9 aa, synthetic construct
  source 1..9: note = Description of Artificial Sequence: Synthetic peptide; note = XENP024373 vlCDR3
FQGSHVPNT

SEQ ID NO: 35044 - protein, 251 aa, synthetic construct
  source 1..251: note = Description of Artificial Sequence: Synthetic polypeptide; note = XENP024374 1C11_H3_L3.90_scFv
QIQLVQSGSELKKPGASVKVSCKASGYTFTHYGMNWVRQAPGQGLEWMGWINTYTGEPTYADGFTGRFVFSLDTSVSTAYLQISSLKAEDTAVYFCARDYYGSSPYWGQGTLVTVSSGKPGSGKPGSGKPGSGKPGSDVVMTQSPDSLAVSLGERATINCKASQSIVHSNGNTYLEWYQQKPGQPPKLLIYKVSNRFSGVPDRFSGSGSGTDFTLTISSVQAEDAATYYCFQGSHVPNTFGQGTKVEIKGS

SEQ ID NO: 35045 - protein, 117 aa, synthetic construct; identical to SEQ ID NO: 33034
  source 1..117: note = Description of Artificial Sequence: Synthetic polypeptide; note = VH of XENP024374

SEQ ID NO: 35046 - protein, 114 aa, synthetic construct
  source 1..114: note = Description of Artificial Sequence: Synthetic polypeptide; note = VL of XENP024374
DVVMTQSPDSLAVSLGERATINCKASQSIVHSNGNTYLEWYQQKPGQPPKLLIYKVSNRFSGVPDRFSGSGSGTDFTLTISSVQAEDAATYYCFQGSHVPNTFGQGTKVEIKGS

SEQ ID NO: 35047 - protein, 5 aa, synthetic construct
  source 1..5: note = Description of Artificial Sequence: Synthetic peptide; note = XENP024374 vhCDR1
HYGMN

SEQ ID NO: 35048 - protein, 17 aa, synthetic construct
  source 1..17: note = Description of Artificial Sequence: Synthetic peptide; note = XENP024374 vhCDR2
WINTYTGEPTYADGFTG

SEQ ID NO: 35049 - protein, 8 aa, synthetic construct
  source 1..8: note = Description of Artificial Sequence: Synthetic peptide; note = XENP024374 vhCDR3
DYYGSSPY

SEQ ID NO: 35050 - protein, 16 aa, synthetic construct
  source 1..16: note = Description of Artificial Sequence: Synthetic peptide; note = XENP024374 vlCDR1
KASQSIVHSNGNTYLE

SEQ ID NO: 35051 - protein, 7 aa, synthetic construct
  source 1..7: note = Description of Artificial Sequence: Synthetic peptide; note = XENP024374 vlCDR2
KVSNRFS

SEQ ID NO: 35052 - protein, 9 aa, synthetic construct
  source 1..9: note = Description of Artificial Sequence: Synthetic peptide; note = XENP024374 vlCDR3
FQGSHVPNT

SEQ ID NO: 35053 - protein, 251 aa, synthetic construct
  source 1..251: note = Description of Artificial Sequence: Synthetic polypeptide; note = XENP024375 1C11_H3_L3.92_scFv
QIQLVQSGSELKKPGASVKVSCKASGYTFTHYGMNWVRQAPGQGLEWMGWINTYTGEPTYADGFTGRFVFSLDTSVSTAYLQISSLKAEDTAVYFCARDYYGSSPYWGQGTLVTVSSGKPGSGKPGSGKPGSGKPGSDIVMTQSPDSLAVSLGERVTINCKASQSIVHSNGNTYLEWYQQKPGQPPKLLIYKVSNRFTGVPDRFSGSGSGTDFTLTISSLQAEDVAVYYCFQGSHVPNTFGGGTKVEIKGS

SEQ ID NO: 35054 - protein, 117 aa, synthetic construct; identical to SEQ ID NO: 33034
  source 1..117: note = Description of Artificial Sequence: Synthetic polypeptide; note = VH of XENP024375

SEQ ID NO: 35055 - protein, 114 aa, synthetic construct
  source 1..114: note = Description of Artificial Sequence: Synthetic polypeptide; note = VL of XENP024375
DIVMTQSPDSLAVSLGERVTINCKASQSIVHSNGNTYLEWYQQKPGQPPKLLIYKVSNRFTGVPDRFSGSGSGTDFTLTISSLQAEDVAVYYCFQGSHVPNTFGGGTKVEIKGS

SEQ ID NO: 35056 - protein, 5 aa, synthetic construct
  source 1..5: note = Description of Artificial Sequence: Synthetic peptide; note = XENP024375 vhCDR1
HYGMN

SEQ ID NO: 35057 - protein, 17 aa, synthetic construct
  source 1..17: note = Description of Artificial Sequence: Synthetic peptide; note = XENP024375 vhCDR2
WINTYTGEPTYADGFTG

SEQ ID NO: 35058 - protein, 8 aa, synthetic construct
  source 1..8: note = Description of Artificial Sequence: Synthetic peptide; note = XENP024375 vhCDR3
DYYGSSPY

SEQ ID NO: 35059 - protein, 16 aa, synthetic construct
  source 1..16: note = Description of Artificial Sequence: Synthetic peptide; note = XENP024375 vlCDR1
KASQSIVHSNGNTYLE

SEQ ID NO: 35060 - protein, 7 aa, synthetic construct
  source 1..7: note = Description of Artificial Sequence: Synthetic peptide; note = XENP024375 vlCDR2
KVSNRFT

SEQ ID NO: 35061 - protein, 9 aa, synthetic construct
  source 1..9: note = Description of Artificial Sequence: Synthetic peptide; note = XENP024375 vlCDR3
FQGSHVPNT

SEQ ID NO: 35062 - protein, 251 aa, synthetic construct
  source 1..251: note = Description of Artificial Sequence: Synthetic polypeptide; note = XENP024376 1C11_H3_L3.94_scFv
QIQLVQSGSELKKPGASVKVSCKASGYTFTHYGMNWVRQAPGQGLEWMGWINTYTGEPTYADGFTGRFVFSLDTSVSTAYLQISSLKAEDTAVYFCARDYYGSSPYWGQGTLVTVSSGKPGSGKPGSGKPGSGKPGSDILMTQSPDSLAVSLGERATINCKSSQSIVHSNGNTYLEWYQQKPGQSPKLLIYKVSNRFTGVPDRFSGSGSGTDFTLTISSVQAEDAATYYCFQGSHVPNTFGQGTKVEIKGS

SEQ ID NO: 35063 - protein, 117 aa, synthetic construct; identical to SEQ ID NO: 33034
  source 1..117: note = Description of Artificial Sequence: Synthetic polypeptide; note = VH of XENP024376

SEQ ID NO: 35064 - protein, 114 aa, synthetic construct
  source 1..114: note = Description of Artificial Sequence: Synthetic polypeptide; note = VL of XENP024376
DILMTQSPDSLAVSLGERATINCKSSQSIVHSNGNTYLEWYQQKPGQSPKLLIYKVSNRFTGVPDRFSGSGSGTDFTLTISSVQAEDAATYYCFQGSHVPNTFGQGTKVEIKGS

SEQ ID NO: 35065 - protein, 5 aa, synthetic construct
  source 1..5: note = Description of Artificial Sequence: Synthetic peptide; note = XENP024376 vhCDR1
HYGMN

SEQ ID NO: 35066 - protein, 17 aa, synthetic construct
  source 1..17: note = Description of Artificial Sequence: Synthetic peptide; note = XENP024376 vhCDR2
WINTYTGEPTYADGFTG

SEQ ID NO: 35067 - protein, 8 aa, synthetic construct
  source 1..8: note = Description of Artificial Sequence: Synthetic peptide; note = XENP024376 vhCDR3
DYYGSSPY

SEQ ID NO: 35068 - protein, 16 aa, synthetic construct
  source 1..16: note = Description of Artificial Sequence: Synthetic peptide; note = XENP024376 vlCDR1
KSSQSIVHSNGNTYLE

SEQ ID NO: 35069 - protein, 7 aa, synthetic construct
  source 1..7: note = Description of Artificial Sequence: Synthetic peptide; note = XENP024376 vlCDR2
KVSNRFT

SEQ ID NO: 35070 - protein, 9 aa, synthetic construct
  source 1..9: note = Description of Artificial Sequence: Synthetic peptide; note = XENP024376 vlCDR3
FQGSHVPNT

SEQ ID NO: 35071 - protein, 251 aa, synthetic construct
  source 1..251: note = Description of Artificial Sequence: Synthetic polypeptide; note = XENP024377 1C11_H3_L3.96_scFv
QIQLVQSGSELKKPGASVKVSCKASGYTFTHYGMNWVRQAPGQGLEWMGWINTYTGEPTYADGFTGRFVFSLDTSVSTAYLQISSLKAEDTAVYFCARDYYGSSPYWGQGTLVTVSSGKPGSGKPGSGKPGSGKPGSDIVMTQSPDSLAVSLGERATINCKASQSIVHSNGNTYLEWYQQKPGQPPKLLIYKVSNRFTGVPDRFSGSGSGTDFTLTISSVQAEDAATYYCFQGSHVPNTFGQGTKVEIKGS

SEQ ID NO: 35072 - protein, 117 aa, synthetic construct; identical to SEQ ID NO: 33034
  source 1..117: note = Description of Artificial Sequence: Synthetic polypeptide; note = VH of XENP024377

SEQ ID NO: 35073 - protein, 114 aa, synthetic construct
  source 1..114: note = Description of Artificial Sequence: Synthetic polypeptide; note = VL of XENP024377
DIVMTQSPDSLAVSLGERATINCKASQSIVHSNGNTYLEWYQQKPGQPPKLLIYKVSNRFTGVPDRFSGSGSGTDFTLTISSVQAEDAATYYCFQGSHVPNTFGQGTKVEIKGS

SEQ ID NO: 35074 - protein, 5 aa, synthetic construct
  source 1..5: note = Description of Artificial Sequence: Synthetic peptide; note = XENP024377 vhCDR1
HYGMN

SEQ ID NO: 35075 - protein, 17 aa, synthetic construct
  source 1..17: note = Description of Artificial Sequence: Synthetic peptide; note = XENP024377 vhCDR2
WINTYTGEPTYADGFTG

SEQ ID NO: 35076 - protein, 8 aa, synthetic construct
  source 1..8: note = Description of Artificial Sequence: Synthetic peptide; note = XENP024377 vhCDR3
DYYGSSPY

SEQ ID NO: 35077 - protein, 16 aa, synthetic construct
  source 1..16: note = Description of Artificial Sequence: Synthetic peptide; note = XENP024377 vlCDR1
KASQSIVHSNGNTYLE

SEQ ID NO: 35078 - protein, 7 aa, synthetic construct
  source 1..7: note = Description of Artificial Sequence: Synthetic peptide; note = XENP024377 vlCDR2
KVSNRFT

SEQ ID NO: 35079 - protein, 9 aa, synthetic construct
  source 1..9: note = Description of Artificial Sequence: Synthetic peptide; note = XENP024377 vlCDR3
FQGSHVPNT

SEQ ID NO: 35080 - protein, 251 aa, synthetic construct
  source 1..251: note = Description of Artificial Sequence: Synthetic polypeptide; note = XENP024378 1C11_H3_L3.105_scFv
QIQLVQSGSELKKPGASVKVSCKASGYTFTHYGMNWVRQAPGQGLEWMGWINTYTGEPTYADGFTGRFVFSLDTSVSTAYLQISSLKAEDTAVYFCARDYYGSSPYWGQGTLVTVSSGKPGSGKPGSGKPGSGKPGSDVLMTQSPDSLPVTPGEPATINCKSSQSIVHSNGNTYLEWYQQKPGQSPKLLIYKVSNRFSGVPDRFSGSGSGTDFTLTISSLQAEDVAVYYCFQGSHVPNTFGGGTKVEIKGS

SEQ ID NO: 35081 - protein, 117 aa, synthetic construct; identical to SEQ ID NO: 33034
  source 1..117: note = Description of Artificial Sequence: Synthetic polypeptide; note = VH of XENP024378

SEQ ID NO: 35082 - protein, 114 aa, synthetic construct
  source 1..114: note = Description of Artificial Sequence: Synthetic polypeptide; note = VL of XENP024378
DVLMTQSPDSLPVTPGEPATINCKSSQSIVHSNGNTYLEWYQQKPGQSPKLLIYKVSNRFSGVPDRFSGSGSGTDFTLTISSLQAEDVAVYYCFQGSHVPNTFGGGTKVEIKGS

SEQ ID NO: 35083 - protein, 5 aa, synthetic construct
  source 1..5: note = Description of Artificial Sequence: Synthetic peptide; note = XENP024378 vhCDR1
HYGMN

SEQ ID NO: 35084 - protein, 17 aa, synthetic construct
  source 1..17: note = Description of Artificial Sequence: Synthetic peptide; note = XENP024378 vhCDR2
WINTYTGEPTYADGFTG

SEQ ID NO: 35085 - protein, 8 aa, synthetic construct
  source 1..8: note = Description of Artificial Sequence: Synthetic peptide; note = XENP024378 vhCDR3
DYYGSSPY

SEQ ID NO: 35086 - protein, 16 aa, synthetic construct
  source 1..16: note = Description of Artificial Sequence: Synthetic peptide; note = XENP024378 vlCDR1
KSSQSIVHSNGNTYLE

SEQ ID NO: 35087 - protein, 7 aa, synthetic construct
  source 1..7: note = Description of Artificial Sequence: Synthetic peptide; note = XENP024378 vlCDR2
KVSNRFS

SEQ ID NO: 35088 - protein, 9 aa, synthetic construct
  source 1..9: note = Description of Artificial Sequence: Synthetic peptide; note = XENP024378 vlCDR3
FQGSHVPNT

SEQ ID NO: 35089 - protein, 251 aa, synthetic construct
  source 1..251: note = Description of Artificial Sequence: Synthetic polypeptide; note = XENP024379 1C11_H3_L3.129_scFv
QIQLVQSGSELKKPGASVKVSCKASGYTFTHYGMNWVRQAPGQGLEWMGWINTYTGEPTYADGFTGRFVFSLDTSVSTAYLQISSLKAEDTAVYFCARDYYGSSPYWGQGTLVTVSSGKPGSGKPGSGKPGSGKPGSDVLMTQSPDSLAVSLGERATINCKSSQSIVHSNGNTYLEWYQQKPGQSPKLLIYKVSNRFSGVPDRFSGSGSGTDFTLTINSLQAEDAATYYCHQGSHVPNTFGGGTKVEIKGS

SEQ ID NO: 35090 - protein, 117 aa, synthetic construct; identical to SEQ ID NO: 33034
  source 1..117: note = Description of Artificial Sequence: Synthetic polypeptide; note = VH of XENP024379

SEQ ID NO: 35091 - protein, 114 aa, synthetic construct
  source 1..114: note = Description of Artificial Sequence: Synthetic polypeptide; note = VL of XENP024379
DVLMTQSPDSLAVSLGERATINCKSSQSIVHSNGNTYLEWYQQKPGQSPKLLIYKVSNRFSGVPDRFSGSGSGTDFTLTINSLQAEDAATYYCHQGSHVPNTFGGGTKVEIKGS

SEQ ID NO: 35092 - protein, 5 aa, synthetic construct
  source 1..5: note = Description of Artificial Sequence: Synthetic peptide; note = XENP024379 vhCDR1
HYGMN

SEQ ID NO: 35093 - protein, 17 aa, synthetic construct
  source 1..17: note = Description of Artificial Sequence: Synthetic peptide; note = XENP024379 vhCDR2
WINTYTGEPTYADGFTG

SEQ ID NO: 35094 - protein, 8 aa, synthetic construct
  source 1..8: note = Description of Artificial Sequence: Synthetic peptide; note = XENP024379 vhCDR3
DYYGSSPY

SEQ ID NO: 35095 - protein, 16 aa, synthetic construct
  source 1..16: note = Description of Artificial Sequence: Synthetic peptide; note = XENP024379 vlCDR1
KSSQSIVHSNGNTYLE

SEQ ID NO: 35096 - protein, 7 aa, synthetic construct
  source 1..7: note = Description of Artificial Sequence: Synthetic peptide; note = XENP024379 vlCDR2
KVSNRFS

SEQ ID NO: 35097 - protein, 9 aa, synthetic construct
  source 1..9: note = Description of Artificial Sequence: Synthetic peptide; note = XENP024379 vlCDR3
HQGSHVPNT

SEQ ID NO: 35098 - protein, 251 aa, synthetic construct
  source 1..251: note = Description of Artificial Sequence: Synthetic polypeptide; note = XENP024380 1C11_H3.176_L3.92_scFv
QIQLVQSGPELKKPGASVKVSCKASGYTFTHYGMNWVKQAPGQGLEWMGWINTNTGEPTYADKFTGRVVFSLDTSQSTIYLQISSLKAEDTAVYYCARDYYGSSPYWGQGTLVTVSSGKPGSGKPGSGKPGSGKPGSDIVMTQSPDSLAVSLGERVTINCKASQSIVHSNGNTYLEWYQQKPGQPPKLLIYKVSNRFTGVPDRFSGSGSGTDFTLTISSLQAEDVAVYYCFQGSHVPNTFGGGTKVEIKGS

SEQ ID NO: 35099 - protein, 117 aa, synthetic construct
  source 1..117: note = Description of Artificial Sequence: Synthetic polypeptide; note = VH of XENP024380
QIQLVQSGPELKKPGASVKVSCKASGYTFTHYGMNWVKQAPGQGLEWMGWINTNTGEPTYADKFTGRVVFSLDTSQSTIYLQISSLKAEDTAVYYCARDYYGSSPYWGQGTLVTVSS

SEQ ID NO: 35100 - protein, 114 aa, synthetic construct; identical to SEQ ID NO: 35055
  source 1..114: note = Description of Artificial Sequence: Synthetic polypeptide; note = VL of XENP024380

SEQ ID NO: 35101 - protein, 5 aa, synthetic construct
  source 1..5: note = Description of Artificial Sequence: Synthetic peptide; note = XENP024380 vhCDR1
HYGMN

SEQ ID NO: 35102 - protein, 17 aa, synthetic construct
  source 1..17: note = Description of Artificial Sequence: Synthetic peptide; note = XENP024380 vhCDR2
WINTNTGEPTYADKFTG

SEQ ID NO: 35103 - protein, 8 aa, synthetic construct
  source 1..8: note = Description of Artificial Sequence: Synthetic peptide; note = XENP024380 vhCDR3
DYYGSSPY

SEQ ID NO: 35104 - protein, 16 aa, synthetic construct
  source 1..16: note = Description of Artificial Sequence: Synthetic peptide; note = XENP024380 vlCDR1
KASQSIVHSNGNTYLE

SEQ ID NO: 35105 - protein, 7 aa, synthetic construct
  source 1..7: note = Description of Artificial Sequence: Synthetic peptide; note = XENP024380 vlCDR2
KVSNRFT

SEQ ID NO: 35106 - protein, 9 aa, synthetic construct
  source 1..9: note = Description of Artificial Sequence: Synthetic peptide; note = XENP024380 vlCDR3
FQGSHVPNT

SEQ ID NO: 35107 - protein, 251 aa, synthetic construct
  source 1..251: note = Description of Artificial Sequence: Synthetic polypeptide; note = XENP024381 1C11_H3.176_L3.94_scFv
QIQLVQSGPELKKPGASVKVSCKASGYTFTHYGMNWVKQAPGQGLEWMGWINTNTGEPTYADKFTGRVVFSLDTSQSTIYLQISSLKAEDTAVYYCARDYYGSSPYWGQGTLVTVSSGKPGSGKPGSGKPGSGKPGSDILMTQSPDSLAVSLGERATINCKSSQSIVHSNGNTYLEWYQQKPGQSPKLLIYKVSNRFTGVPDRFSGSGSGTDFTLTISSVQAEDAATYYCFQGSHVPNTFGQGTKVEIKGS

SEQ ID NO: 35108 - protein, 117 aa, synthetic construct; identical to SEQ ID NO: 35099
  source 1..117: note = Description of Artificial Sequence: Synthetic polypeptide; note = VH of XENP024381

SEQ ID NO: 35109 - protein, 114 aa, synthetic construct; identical to SEQ ID NO: 35064
  source 1..114: note = Description of Artificial Sequence: Synthetic polypeptide; note = VL of XENP024381

SEQ ID NO: 35110 - protein, 5 aa, synthetic construct
  source 1..5: note = Description of Artificial Sequence: Synthetic peptide; note = XENP024381 vhCDR1
HYGMN

SEQ ID NO: 35111 - protein, 17 aa, synthetic construct
  source 1..17: note = Description of Artificial Sequence: Synthetic peptide; note = XENP024381 vhCDR2
WINTNTGEPTYADKFTG

SEQ ID NO: 35112 - protein, 8 aa, synthetic construct
  source 1..8: note = Description of Artificial Sequence: Synthetic peptide; note = XENP024381 vhCDR3
DYYGSSPY

SEQ ID NO: 35113 - protein, 16 aa, synthetic construct
  source 1..16: note = Description of Artificial Sequence: Synthetic peptide; note = XENP024381 vlCDR1
KSSQSIVHSNGNTYLE

SEQ ID NO: 35114 - protein, 7 aa, synthetic construct
  source 1..7: note = Description of Artificial Sequence: Synthetic peptide; note = XENP024381 vlCDR2
KVSNRFT

SEQ ID NO: 35115 - protein, 9 aa, synthetic construct
  source 1..9: note = Description of Artificial Sequence: Synthetic peptide; note = XENP024381 vlCDR3
FQGSHVPNT

SEQ ID NO: 35116 - protein, 251 aa, synthetic construct
  source 1..251: note = Description of Artificial Sequence: Synthetic polypeptide; note = XENP024382 1C11_H3.176_L3.96_scFv
QIQLVQSGPELKKPGASVKVSCKASGYTFTHYGMNWVKQAPGQGLEWMGWINTNTGEPTYADKFTGRVVFSLDTSQSTIYLQISSLKAEDTAVYYCARDYYGSSPYWGQGTLVTVSSGKPGSGKPGSGKPGSGKPGSDIVMTQSPDSLAVSLGERATINCKASQSIVHSNGNTYLEWYQQKPGQPPKLLIYKVSNRFTGVPDRFSGSGSGTDFTLTISSVQAEDAATYYCFQGSHVPNTFGQGTKVEIKGS

SEQ ID NO: 35117 - protein, 117 aa, synthetic construct; identical to SEQ ID NO: 35099
  source 1..117: note = Description of Artificial Sequence: Synthetic polypeptide; note = VH of XENP024382

SEQ ID NO: 35118 - protein, 114 aa, synthetic construct; identical to SEQ ID NO: 35073
  source 1..114: note = Description of Artificial Sequence: Synthetic polypeptide; note = VL of XENP024382

SEQ ID NO: 35119 - protein, 5 aa, synthetic construct
  source 1..5: note = Description of Artificial Sequence: Synthetic peptide; note = XENP024382 vhCDR1
HYGMN

SEQ ID NO: 35120 - protein, 17 aa, synthetic construct
  source 1..17: note = Description of Artificial Sequence: Synthetic peptide; note = XENP024382 vhCDR2
WINTNTGEPTYADKFTG

SEQ ID NO: 35121 - protein, 8 aa, synthetic construct
  source 1..8: note = Description of Artificial Sequence: Synthetic peptide; note = XENP024382 vhCDR3
DYYGSSPY

SEQ ID NO: 35122 - protein, 16 aa, synthetic construct
  source 1..16: note = Description of Artificial Sequence: Synthetic peptide; note = XENP024382 vlCDR1
KASQSIVHSNGNTYLE

SEQ ID NO: 35123 - protein, 7 aa, synthetic construct
  source 1..7: note = Description of Artificial Sequence: Synthetic peptide; note = XENP024382 vlCDR2
KVSNRFT

SEQ ID NO: 35124 - protein, 9 aa, synthetic construct
  source 1..9: note = Description of Artificial Sequence: Synthetic peptide; note = XENP024382 vlCDR3
FQGSHVPNT

SEQ ID NO: 35125 - protein, 251 aa, synthetic construct
  source 1..251: note = Description of Artificial Sequence: Synthetic polypeptide; note = XENP024414 1C11_H3_L3.133_scFv
QIQLVQSGSELKKPGASVKVSCKASGYTFTHYGMNWVRQAPGQGLEWMGWINTYTGEPTYADGFTGRFVFSLDTSVSTAYLQISSLKAEDTAVYFCARDYYGSSPYWGQGTLVTVSSGKPGSGKPGSGKPGSGKPGSDVVMTQSPDSLAVSLGERVTINCKASQSIVHSNGNTYLEWYQQKPGQPPKLLIYKVSNRFSGVPDRFSGSGSGTDFTLTISSVQAEDAATYYCFQGSHVPNTFGQGTKVEIKGS

SEQ ID NO: 35126 - protein, 117 aa, synthetic construct; identical to SEQ ID NO: 33034
  source 1..117: note = Description of Artificial Sequence: Synthetic polypeptide; note = VH of XENP024414

SEQ ID NO: 35127 - protein, 114 aa, synthetic construct
  source 1..114: note = Description of Artificial Sequence: Synthetic polypeptide; note = VL of XENP024414
DVVMTQSPDSLAVSLGERVTINCKASQSIVHSNGNTYLEWYQQKPGQPPKLLIYKVSNRFSGVPDRFSGSGSGTDFTLTISSVQAEDAATYYCFQGSHVPNTFGQGTKVEIKGS

SEQ ID NO: 35128 - protein, 5 aa, synthetic construct
  source 1..5: note = Description of Artificial Sequence: Synthetic peptide; note = XENP024414 vhCDR1
HYGMN

SEQ ID NO: 35129 - protein, 17 aa, synthetic construct
  source 1..17: note = Description of Artificial Sequence: Synthetic peptide; note = XENP024414 vhCDR2
WINTYTGEPTYADGFTG

SEQ ID NO: 35130 - protein, 8 aa, synthetic construct
  source 1..8: note = Description of Artificial Sequence: Synthetic peptide; note = XENP024414 vhCDR3
DYYGSSPY

SEQ ID NO: 35131 - protein, 16 aa, synthetic construct
  source 1..16: note = Description of Artificial Sequence: Synthetic peptide; note = XENP024414 vlCDR1
KASQSIVHSNGNTYLE

SEQ ID NO: 35132 - protein, 7 aa, synthetic construct
  source 1..7: note = Description of Artificial Sequence: Synthetic peptide; note = XENP024414 vlCDR2
KVSNRFS

SEQ ID NO: 35133 - protein, 9 aa, synthetic construct
  source 1..9: note = Description of Artificial Sequence: Synthetic peptide; note = XENP024414 vlCDR3
FQGSHVPNT

SEQ ID NO: 35134 - protein, 251 aa, synthetic construct
  source 1..251: note = Description of Artificial Sequence: Synthetic polypeptide; note = XENP024415 1C11_H3_L3.134_scFv
QIQLVQSGSELKKPGASVKVSCKASGYTFTHYGMNWVRQAPGQGLEWMGWINTYTGEPTYADGFTGRFVFSLDTSVSTAYLQISSLKAEDTAVYFCARDYYGSSPYWGQGTLVTVSSGKPGSGKPGSGKPGSGKPGSDVVMTQSPDSLAVSLGERVTINCKASQSIVHSNGNTYLEWYQQKPGQPPKLLIYKVSNRFSGVPDRFSGSGSGTDFTLTISSVEAEDAATYYCFQGSHVPNTFGQGTKVEIKGS

SEQ ID NO: 35135 - protein, 117 aa, synthetic construct; identical to SEQ ID NO: 33034
  source 1..117: note = Description of Artificial Sequence: Synthetic polypeptide; note = VH of XENP024415

SEQ ID NO: 35136 - protein, 114 aa, synthetic construct
  source 1..114: note = Description of Artificial Sequence: Synthetic polypeptide; note = VL of XENP024415
DVVMTQSPDSLAVSLGERVTINCKASQSIVHSNGNTYLEWYQQKPGQPPKLLIYKVSNRFSGVPDRFSGSGSGTDFTLTISSVEAEDAATYYCFQGSHVPNTFGQGTKVEIKGS

SEQ ID NO: 35137 - protein, 5 aa, synthetic construct
  source 1..5: note = Description of Artificial Sequence: Synthetic peptide; note = XENP024415 vhCDR1
HYGMN

SEQ ID NO: 35138 - protein, 17 aa, synthetic construct
  source 1..17: note = Description of Artificial Sequence: Synthetic peptide; note = XENP024415 vhCDR2
WINTYTGEPTYADGFTG

SEQ ID NO: 35139 - protein, 8 aa, synthetic construct
  source 1..8: note = Description of Artificial Sequence: Synthetic peptide; note = XENP024415 vhCDR3
DYYGSSPY

SEQ ID NO: 35140 - protein, 16 aa, synthetic construct
  source 1..16: note = Description of Artificial Sequence: Synthetic peptide; note = XENP024415 vlCDR1
KASQSIVHSNGNTYLE

SEQ ID NO: 35141 - protein, 7 aa, synthetic construct
  source 1..7: note = Description of Artificial Sequence: Synthetic peptide; note = XENP024415 vlCDR2
KVSNRFS

SEQ ID NO: 35142 - protein, 9 aa, synthetic construct
  source 1..9: note = Description of Artificial Sequence: Synthetic peptide; note = XENP024415 vlCDR3
FQGSHVPNT

SEQ ID NO: 35143 - protein, 251 aa, synthetic construct
  source 1..251: note = Description of Artificial Sequence: Synthetic polypeptide; note = XENP024416 1C11_H3_L3.135_scFv
QIQLVQSGSELKKPGASVKVSCKASGYTFTHYGMNWVRQAPGQGLEWMGWINTYTGEPTYADGFTGRFVFSLDTSVSTAYLQISSLKAEDTAVYFCARDYYGSSPYWGQGTLVTVSSGKPGSGKPGSGKPGSGKPGSDVVMTQSPDSLAVSLGERVTINCKASQSIVHSNGNTYLEWYQQKPGQPPKLLIYKVSNRFSGVPDRFSGSGSGTDFTLTISSMQAEDAATYYCFQGSHVPNTFGQGTKVEIKGS

SEQ ID NO: 35144 - protein, 117 aa, synthetic construct; identical to SEQ ID NO: 33034
  source 1..117: note = Description of Artificial Sequence: Synthetic polypeptide; note = VH of XENP024416

SEQ ID NO: 35145 - protein, 114 aa, synthetic construct
  source 1..114: note = Description of Artificial Sequence: Synthetic polypeptide; note = VL of XENP024416
DVVMTQSPDSLAVSLGERVTINCKASQSIVHSNGNTYLEWYQQKPGQPPKLLIYKVSNRFSGVPDRFSGSGSGTDFTLTISSMQAEDAATYYCFQGSHVPNTFGQGTKVEIKGS

SEQ ID NO: 35146 - protein, 5 aa, synthetic construct
  source 1..5: note = Description of Artificial Sequence: Synthetic peptide; note = XENP024416 vhCDR1
HYGMN

SEQ ID NO: 35147 - protein, 17 aa, synthetic construct
  source 1..17: note = Description of Artificial Sequence: Synthetic peptide; note = XENP024416 vhCDR2
WINTYTGEPTYADGFTG

SEQ ID NO: 35148 - protein, 8 aa, synthetic construct
  source 1..8: note = Description of Artificial Sequence: Synthetic peptide; note = XENP024416 vhCDR3
DYYGSSPY

SEQ ID NO: 35149 - protein, 16 aa, synthetic construct
  source 1..16: note = Description of Artificial Sequence: Synthetic peptide; note = XENP024416 vlCDR1
KASQSIVHSNGNTYLE

SEQ ID NO: 35150 - protein, 7 aa, synthetic construct
  source 1..7: note = Description of Artificial Sequence: Synthetic peptide; note = XENP024416 vlCDR2
KVSNRFS

SEQ ID NO: 35151 - protein, 9 aa, synthetic construct
  source 1..9: note = Description of Artificial Sequence: Synthetic peptide; note = XENP024416 vlCDR3
FQGSHVPNT

SEQ ID NO: 35152 - protein, 251 aa, synthetic construct
  source 1..251: note = Description of Artificial Sequence: Synthetic polypeptide; note = XENP024417 1C11_H3_L3.136_scFv
QIQLVQSGSELKKPGASVKVSCKASGYTFTHYGMNWVRQAPGQGLEWMGWINTYTGEPTYADGFTGRFVFSLDTSVSTAYLQISSLKAEDTAVYFCARDYYGSSPYWGQGTLVTVSSGKPGSGKPGSGKPGSGKPGSDVVMTQSPDSLAVSLGERITINCKASQSIVHSNGNTYLEWYQQKPGQPPKLLIYKVSNRFSGVPDRFSGSGSGTDFTLTISSMQAEDAATYYCFQGSHVPNTFGQGTKVEIKGS

SEQ ID NO: 35153 - protein, 117 aa, synthetic construct; identical to SEQ ID NO: 33034
  source 1..117: note = Description of Artificial Sequence: Synthetic polypeptide; note = VH of XENP024417

SEQ ID NO: 35154 - protein, 114 aa, synthetic construct
  source 1..114: note = Description of Artificial Sequence: Synthetic polypeptide; note = VL of XENP024417
DVVMTQSPDSLAVSLGERITINCKASQSIVHSNGNTYLEWYQQKPGQPPKLLIYKVSNRFSGVPDRFSGSGSGTDFTLTISSMQAEDAATYYCFQGSHVPNTFGQGTKVEIKGS

SEQ ID NO: 35155 - protein, 5 aa, synthetic construct
  source 1..5: note = Description of Artificial Sequence: Synthetic peptide; note = XENP024417 vhCDR1
HYGMN

SEQ ID NO: 35156 - protein, 17 aa, synthetic construct
  source 1..17: note = Description of Artificial Sequence: Synthetic peptide; note = XENP024417 vhCDR2
WINTYTGEPTYADGFTG

SEQ ID NO: 35157 - protein, 8 aa, synthetic construct
  source 1..8: note = Description of Artificial Sequence: Synthetic peptide; note = XENP024417 vhCDR3
DYYGSSPY

SEQ ID NO: 35158 - protein, 16 aa, synthetic construct
  source 1..16: note = Description of Artificial Sequence: Synthetic peptide; note = XENP024417 vlCDR1
KASQSIVHSNGNTYLE

SEQ ID NO: 35159 - protein, 7 aa, synthetic construct
  source 1..7: note = Description of Artificial Sequence: Synthetic peptide; note = XENP024417 vlCDR2
KVSNRFS

SEQ ID NO: 35160 - protein, 9 aa, synthetic construct
  source 1..9: note = Description of Artificial Sequence: Synthetic peptide; note = XENP024417 vlCDR3
FQGSHVPNT

SEQ ID NO: 35161 - protein, 251 aa, synthetic construct
  source 1..251: note = Description of Artificial Sequence: Synthetic polypeptide; note = XENP024418 1C11_H3_L3.137_scFv
QIQLVQSGSELKKPGASVKVSCKASGYTFTHYGMNWVRQAPGQGLEWMGWINTYTGEPTYADGFTGRFVFSLDTSVSTAYLQISSLKAEDTAVYFCARDYYGSSPYWGQGTLVTVSSGKPGSGKPGSGKPGSGKPGSDVVMTQSPDSLAVSLGERITINCKASQSIVHSNGNTYLEWYQQKPGQPPKLLIYKVSNRFSGVPDRFSGSGSGTDFTLTISSVQAEDAATYYCFQGSHVPNTFGQGTKVEIKGS

SEQ ID NO: 35162 - protein, 117 aa, synthetic construct; identical to SEQ ID NO: 33034
  source 1..117: note = Description of Artificial Sequence: Synthetic polypeptide; note = VH of XENP024418

SEQ ID NO: 35163 - protein, 114 aa, synthetic construct
  source 1..114: note = Description of Artificial Sequence: Synthetic polypeptide; note = VL of XENP024418
DVVMTQSPDSLAVSLGERITINCKASQSIVHSNGNTYLEWYQQKPGQPPKLLIYKVSNRFSGVPDRFSGSGSGTDFTLTISSVQAEDAATYYCFQGSHVPNTFGQGTKVEIKGS

SEQ ID NO: 35164 - protein, 5 aa, synthetic construct
  source 1..5: note = Description of Artificial Sequence: Synthetic peptide; note = XENP024418 vhCDR1
HYGMN

SEQ ID NO: 35165 - protein, 17 aa, synthetic construct
  source 1..17: note = Description of Artificial Sequence: Synthetic peptide; note = XENP024418 vhCDR2
WINTYTGEPTYADGFTG

SEQ ID NO: 35166 - protein, 8 aa, synthetic construct
  source 1..8: note = Description of Artificial Sequence: Synthetic peptide; note = XENP024418 vhCDR3
DYYGSSPY

SEQ ID NO: 35167 - protein, 16 aa, synthetic construct
  source 1..16: note = Description of Artificial Sequence: Synthetic peptide; note = XENP024418 vlCDR1
KASQSIVHSNGNTYLE

SEQ ID NO: 35168 - protein, 7 aa, synthetic construct
  source 1..7: note = Description of Artificial Sequence: Synthetic peptide; note = XENP024418 vlCDR2
KVSNRFS

SEQ ID NO: 35169 - protein, 9 aa, synthetic construct
  source 1..9: note = Description of Artificial Sequence: Synthetic peptide; note = XENP024418 vlCDR3
FQGSHVPNT

SEQ ID NO: 35170 - protein, 251 aa, synthetic construct
  source 1..251: note = Description of Artificial Sequence: Synthetic polypeptide; note = XENP024419 1C11_H3_L3.138_scFv
QIQLVQSGSELKKPGASVKVSCKASGYTFTHYGMNWVRQAPGQGLEWMGWINTYTGEPTYADGFTGRFVFSLDTSVSTAYLQISSLKAEDTAVYFCARDYYGSSPYWGQGTLVTVSSGKPGSGKPGSGKPGSGKPGSDVVMTQSPDSLAVSLGERITINCKASQSIVHSNGNTYLEWYQQKPGQPPKLLIYKVSNRFSGVPDRFSGSGSGTDFTLTISSVEAEDAATYYCFQGSHVPNTFGQGTKVEIKGS

SEQ ID NO: 35171 - protein, 117 aa, synthetic construct; identical to SEQ ID NO: 33034
  source 1..117: note = Description of Artificial Sequence: Synthetic polypeptide; note = VH of XENP024419

SEQ ID NO: 35172 - protein, 114 aa, synthetic construct
  source 1..114: note = Description of Artificial Sequence: Synthetic polypeptide; note = VL of XENP024419
DVVMTQSPDSLAVSLGERITINCKASQSIVHSNGNTYLEWYQQKPGQPPKLLIYKVSNRFSGVPDRFSGSGSGTDFTLTISSVEAEDAATYYCFQGSHVPNTFGQGTKVEIKGS

SEQ ID NO: 35173 - protein, 5 aa, synthetic construct
  source 1..5: note = Description of Artificial Sequence: Synthetic peptide; note = XENP024419 vhCDR1
HYGMN

SEQ ID NO: 35174 - protein, 17 aa, synthetic construct
  source 1..17: note = Description of Artificial Sequence: Synthetic peptide; note = XENP024419 vhCDR2
WINTYTGEPTYADGFTG

SEQ ID NO: 35175 - protein, 8 aa, synthetic construct
  source 1..8: note = Description of Artificial Sequence: Synthetic peptide; note = XENP024419 vhCDR3
DYYGSSPY

SEQ ID NO: 35176 - protein, 16 aa, synthetic construct
  source 1..16: note = Description of Artificial Sequence: Synthetic peptide; note = XENP024419 vlCDR1
KASQSIVHSNGNTYLE

SEQ ID NO: 35177 - protein, 7 aa, synthetic construct
  source 1..7: note = Description of Artificial Sequence: Synthetic peptide; note = XENP024419 vlCDR2
KVSNRFS

SEQ ID NO: 35178 - protein, 9 aa, synthetic construct
  source 1..9: note = Description of Artificial Sequence: Synthetic peptide; note = XENP024419 vlCDR3
FQGSHVPNT

SEQ ID NO: 35179 - protein, 251 aa, synthetic construct
  source 1..251: note = Description of Artificial Sequence: Synthetic polypeptide; note = XENP024420 1C11_H3_L3.139_scFv
QIQLVQSGSELKKPGASVKVSCKASGYTFTHYGMNWVRQAPGQGLEWMGWINTYTGEPTYADGFTGRFVFSLDTSVSTAYLQISSLKAEDTAVYFCARDYYGSSPYWGQGTLVTVSSGKPGSGKPGSGKPGSGKPGSDVVMTQSPDSLAVSLGERATINCKASQSIVHSNGNTYLEWYQQKPGQPPKLLIYKVSNRFSGIPDRFSGSGSGTDFTLTISSVQAEDAATYYCFQGSHVPNTFGQGTKVEIKGS

SEQ ID NO: 35180 - protein, 117 aa, synthetic construct; identical to SEQ ID NO: 33034
  source 1..117: note = Description of Artificial Sequence: Synthetic polypeptide; note = VH of XENP024420

SEQ ID NO: 35181 - protein, 114 aa, synthetic construct
  source 1..114: note = Description of Artificial Sequence: Synthetic polypeptide; note = VL of XENP024420
DVVMTQSPDSLAVSLGERATINCKASQSIVHSNGNTYLEWYQQKPGQPPKLLIYKVSNRFSGIPDRFSGSGSGTDFTLTISSVQAEDAATYYCFQGSHVPNTFGQGTKVEIKGS

SEQ ID NO: 35182 - protein, 5 aa, synthetic construct
  source 1..5: note = Description of Artificial Sequence: Synthetic peptide; note = XENP024420 vhCDR1
HYGMN

SEQ ID NO: 35183 - protein, 17 aa, synthetic construct
  source 1..17: note = Description of Artificial Sequence: Synthetic peptide; note = XENP024420 vhCDR2
WINTYTGEPTYADGFTG

SEQ ID NO: 35184 - protein, 8 aa, synthetic construct
  source 1..8: note = Description of Artificial Sequence: Synthetic peptide; note = XENP024420 vhCDR3
DYYGSSPY

SEQ ID NO: 35185 - protein, 16 aa, synthetic construct
  source 1..16: note = Description of Artificial Sequence: Synthetic peptide; note = XENP024420 vlCDR1
KASQSIVHSNGNTYLE

SEQ ID NO: 35186 - protein, 7 aa, synthetic construct
  source 1..7: note = Description of Artificial Sequence: Synthetic peptide; note = XENP024420 vlCDR2
KVSNRFS

SEQ ID NO: 35187 - protein, 9 aa, synthetic construct
  source 1..9: note = Description of Artificial Sequence: Synthetic peptide; note = XENP024420 vlCDR3
FQGSHVPNT

SEQ ID NO: 35188 - protein, 251 aa, synthetic construct
  source 1..251: note = Description of Artificial Sequence: Synthetic polypeptide; note = XENP024421 1C11_H3_L3.140_scFv
QIQLVQSGSELKKPGASVKVSCKASGYTFTHYGMNWVRQAPGQGLEWMGWINTYTGEPTYADGFTGRFVFSLDTSVSTAYLQISSLKAEDTAVYFCARDYYGSSPYWGQGTLVTVSSGKPGSGKPGSGKPGSGKPGSDIVMTQSPDSLAVSLGERATINCKASQSIVHSNGNTYLEWYQQKPGQSPKLLIYKVSNRFSGVPDRFSGSGSGTDFTLTISSVEAEDVATYYCFQGSHVPNTFGQGTKVEIKGS

SEQ ID NO: 35189 - protein, 117 aa, synthetic construct; identical to SEQ ID NO: 33034
  source 1..117: note = Description of Artificial Sequence: Synthetic polypeptide; note = VH of XENP024421

SEQ ID NO: 35190 - protein, 114 aa, synthetic construct
  source 1..114: note = Description of Artificial Sequence: Synthetic polypeptide; note = VL of XENP024421
DIVMTQSPDSLAVSLGERATINCKASQSIVHSNGNTYLEWYQQKPGQSPKLLIYKVSNRFSGVPDRFSGSGSGTDFTLTISSVEAEDVATYYCFQGSHVPNTFGQGTKVEIKGS

SEQ ID NO: 35191 - protein, 5 aa, synthetic construct
  source 1..5: note = Description of Artificial Sequence: Synthetic peptide; note = XENP024421 vhCDR1
HYGMN

SEQ ID NO: 35192 - protein, 17 aa, synthetic construct
  source 1..17: note = Description of Artificial Sequence: Synthetic peptide; note = XENP024421 vhCDR2
WINTYTGEPTYADGFTG

SEQ ID NO: 35193 - protein, 8 aa, synthetic construct
  source 1..8: note = Description of Artificial Sequence: Synthetic peptide; note = XENP024421 vhCDR3
DYYGSSPY

SEQ ID NO: 35194 - protein, 16 aa, synthetic construct
  source 1..16: note = Description of Artificial Sequence: Synthetic peptide; note = XENP024421 vlCDR1
KASQSIVHSNGNTYLE

SEQ ID NO: 35195 - protein, 7 aa, synthetic construct
  source 1..7: note = Description of Artificial Sequence: Synthetic peptide; note = XENP024421 vlCDR2
KVSNRFS

SEQ ID NO: 35196 - protein, 9 aa, synthetic construct
  source 1..9: note = Description of Artificial Sequence: Synthetic peptide; note = XENP024421 vlCDR3
FQGSHVPNT

SEQ ID NO: 35197 - protein, 251 aa, synthetic construct
  source 1..251: note = Description of Artificial Sequence: Synthetic polypeptide; note = XENP024422 1C11_H3_L3.141_scFv
QIQLVQSGSELKKPGASVKVSCKASGYTFTHYGMNWVRQAPGQGLEWMGWINTYTGEPTYADGFTGRFVFSLDTSVSTAYLQISSLKAEDTAVYFCARDYYGSSPYWGQGTLVTVSSGKPGSGKPGSGKPGSGKPGSDIVMTQSPDSLAVSLGERATINCKASQSIVHSNGNTYLEWYQQKPGQPPKLLIYKVSNRFSGVPDRFSGSGSGTDFTLTISSVEAEDVATYYCFQGSHVPNTFGQGTKVEIKGS

SEQ ID NO: 35198 - protein, 117 aa, synthetic construct; identical to SEQ ID NO: 33034
  source 1..117: note = Description of Artificial Sequence: Synthetic polypeptide; note = VH of XENP024422

SEQ ID NO: 35199 - protein, 114 aa, synthetic construct
  source 1..114: note = Description of Artificial Sequence: Synthetic polypeptide; note = VL of XENP024422
DIVMTQSPDSLAVSLGERATINCKASQSIVHSNGNTYLEWYQQKPGQPPKLLIYKVSNRFSGVPDRFSGSGSGTDFTLTISSVEAEDVATYYCFQGSHVPNTFGQGTKVEIKGS

SEQ ID NO: 35200 - protein, 5 aa, synthetic construct
  source 1..5: note = Description of Artificial Sequence: Synthetic peptide; note = XENP024422 vhCDR1
HYGMN

SEQ ID NO: 35201 - protein, 17 aa, synthetic construct
  source 1..17: note = Description of Artificial Sequence: Synthetic peptide; note = XENP024422 vhCDR2
WINTYTGEPTYADGFTG

SEQ ID NO: 35202 - protein, 8 aa, synthetic construct
  source 1..8: note = Description of Artificial Sequence: Synthetic peptide; note = XENP024422 vhCDR3
DYYGSSPY

SEQ ID NO: 35203 - protein, 16 aa, synthetic construct
  source 1..16: note = Description of Artificial Sequence: Synthetic peptide; note = XENP024422 vlCDR1
KASQSIVHSNGNTYLE

SEQ ID NO: 35204 - protein, 7 aa, synthetic construct
  source 1..7: note = Description of Artificial Sequence: Synthetic peptide; note = XENP024422 vlCDR2
KVSNRFS

SEQ ID NO: 35205 - protein, 9 aa, synthetic construct
  source 1..9: note = Description of Artificial Sequence: Synthetic peptide; note = XENP024422 vlCDR3
FQGSHVPNT

SEQ ID NO: 35206 - protein, 251 aa, synthetic construct
  source 1..251: note = Description of Artificial Sequence: Synthetic polypeptide; note = XENP024423 1C11_H3_L3.142_scFv
QIQLVQSGSELKKPGASVKVSCKASGYTFTHYGMNWVRQAPGQGLEWMGWINTYTGEPTYADGFTGRFVFSLDTSVSTAYLQISSLKAEDTAVYFCARDYYGSSPYWGQGTLVTVSSGKPGSGKPGSGKPGSGKPGSDIVMTQSPDSLAVSLGERATINCKASQSIVHSNGNTYLEWYQQKPGQAPKLLIYKVSNRFSGVPDRFSGSGSGTDFTLTISSVEAEDVATYYCFQGSHVPNTFGQGTKVEIKGS

SEQ ID NO: 35207 - protein, 117 aa, synthetic construct; identical to SEQ ID NO: 33034
  source 1..117: note = Description of Artificial Sequence: Synthetic polypeptide; note = VH of XENP024423

SEQ ID NO: 35208 - protein, 114 aa, synthetic construct
  source 1..114: note = Description of Artificial Sequence: Synthetic polypeptide; note = VL of XENP024423
DIVMTQSPDSLAVSLGERATINCKASQSIVHSNGNTYLEWYQQKPGQAPKLLIYKVSNRFSGVPDRFSGSGSGTDFTLTISSVEAEDVATYYCFQGSHVPNTFGQGTKVEIKGS

SEQ ID NO: 35209 - protein, 5 aa, synthetic construct
  source 1..5: note = Description of Artificial Sequence: Synthetic peptide; note = XENP024423 vhCDR1
HYGMN

SEQ ID NO: 35210 - protein, 17 aa, synthetic construct
  source 1..17: note = Description of Artificial Sequence: Synthetic peptide; note = XENP024423 vhCDR2
WINTYTGEPTYADGFTG

SEQ ID NO: 35211 - protein, 8 aa, synthetic construct
  source 1..8: note = Description of Artificial Sequence: Synthetic peptide; note = XENP024423 vhCDR3
DYYGSSPY

SEQ ID NO: 35212 - protein, 16 aa, synthetic construct
  source 1..16: note = Description of Artificial Sequence: Synthetic peptide; note = XENP024423 vlCDR1
KASQSIVHSNGNTYLE

SEQ ID NO: 35213 - protein, 7 aa, synthetic construct
  source 1..7: note = Description of Artificial Sequence: Synthetic peptide; note = XENP024423 vlCDR2
KVSNRFS

SEQ ID NO: 35214 - protein, 9 aa, synthetic construct
  source 1..9: note = Description of Artificial Sequence: Synthetic peptide; note = XENP024423 vlCDR3
FQGSHVPNT

SEQ ID NO: 35215 - protein, 251 aa, synthetic construct
  source 1..251: note = Description of Artificial Sequence: Synthetic polypeptide; note = XENP024424 1C11_H3.176_L3_scFv
QIQLVQSGSELKKPGASVKVSCKASGYTFTHYGMNWVRQAPGQGLEWMGWINTYTGEPTYAPGFKGRFVFSLDTSVSTAYLQISSLKAEDTAVYFCARDYYGSSPYWGQGTLVTVSSGKPGSGKPGSGKPGSGKPGSDVLMTQSPDSLAVSLGERATINCKSSQSIVHSNGNTYLEWYQQKPGQSPKLLIYKVSNRFSGVPDRFSGSGSGTDFTLTISSLQAEDVAVYYCFQGSHVPNTFGGGTKVEIKGS

SEQ ID NO: 35216 - protein, 117 aa, synthetic construct
  source 1..117: note = Description of Artificial Sequence: Synthetic polypeptide; note = VH of XENP024424
QIQLVQSGSELKKPGASVKVSCKASGYTFTHYGMNWVRQAPGQGLEWMGWINTYTGEPTYAPGFKGRFVFSLDTSVSTAYLQISSLKAEDTAVYFCARDYYGSSPYWGQGTLVTVSS

SEQ ID NO: 35217 - protein, 114 aa, synthetic construct; identical to SEQ ID NO: 33651
  source 1..114: note = Description of Artificial Sequence: Synthetic polypeptide; note = VL of XENP024424

SEQ ID NO: 35218 - protein, 5 aa, synthetic construct
  source 1..5: note = Description of Artificial Sequence: Synthetic peptide; note = XENP024424 vhCDR1
HYGMN

SEQ ID NO: 35219 - protein, 17 aa, synthetic construct
  source 1..17: note = Description of Artificial Sequence: Synthetic peptide; note = XENP024424 vhCDR2
WINTYTGEPTYAPGFKG

SEQ ID NO: 35220 - protein, 8 aa, synthetic construct
  source 1..8: note = Description of Artificial Sequence: Synthetic peptide; note = XENP024424 vhCDR3
DYYGSSPY

SEQ ID NO: 35221 - protein, 16 aa, synthetic construct
  source 1..16: note = Description of Artificial Sequence: Synthetic peptide; note = XENP024424 vlCDR1
KSSQSIVHSNGNTYLE

SEQ ID NO: 35222 - protein, 7 aa, synthetic construct
  source 1..7: note = Description of Artificial Sequence: Synthetic peptide; note = XENP024424 vlCDR2
KVSNRFS

SEQ ID NO: 35223 - protein, 9 aa, synthetic construct
  source 1..9: note = Description of Artificial Sequence: Synthetic peptide; note = XENP024424 vlCDR3
FQGSHVPNT

SEQ ID NO: 35224 - protein, 251 aa, synthetic construct
  source 1..251: note = Description of Artificial Sequence: Synthetic polypeptide; note = XENP024425 1C11_H3.177_L3_scFv
QIQLVQSGSELKKPGASVKVSCKASGYTFTHYGMNWVRQAPGQGLEWMGWINTYTGEPTYAPKFTGRFVFSLDTSVSTAYLQISSLKAEDTAVYFCARDYYGSSPYWGQGTLVTVSSGKPGSGKPGSGKPGSGKPGSDVLMTQSPDSLAVSLGERATINCKSSQSIVHSNGNTYLEWYQQKPGQSPKLLIYKVSNRFSGVPDRFSGSGSGTDFTLTISSLQAEDVAVYYCFQGSHVPNTFGGGTKVEIKGS

SEQ ID NO: 35225 - protein, 117 aa, synthetic construct
  source 1..117: note = Description of Artificial Sequence: Synthetic polypeptide; note = VH of XENP024425
QIQLVQSGSELKKPGASVKVSCKASGYTFTHYGMNWVRQAPGQGLEWMGWINTYTGEPTYAPKFTGRFVFSLDTSVSTAYLQISSLKAEDTAVYFCARDYYGSSPYWGQGTLVTVSS

SEQ ID NO: 35226 - protein, 114 aa, synthetic construct; identical to SEQ ID NO: 33651
  source 1..114: note = Description of Artificial Sequence: Synthetic polypeptide; note = VL of XENP024425

SEQ ID NO: 35227 - protein, 5 aa, synthetic construct
  source 1..5: note = Description of Artificial Sequence: Synthetic peptide; note = XENP024425 vhCDR1
HYGMN

SEQ ID NO: 35228 - protein, 17 aa, synthetic construct
  source 1..17: note = Description of Artificial Sequence: Synthetic peptide; note = XENP024425 vhCDR2
WINTYTGEPTYAPKFTG

SEQ ID NO: 35229 - protein, 8 aa, synthetic construct
  source 1..8: note = Description of Artificial Sequence: Synthetic peptide; note = XENP024425 vhCDR3
DYYGSSPY

SEQ ID NO: 35230 - protein, 16 aa, synthetic construct
  source 1..16: note = Description of Artificial Sequence: Synthetic peptide; note = XENP024425 vlCDR1
KSSQSIVHSNGNTYLE

SEQ ID NO: 35231 - protein, 7 aa, synthetic construct
  source 1..7: note = Description of Artificial Sequence: Synthetic peptide; note = XENP024425 vlCDR2
KVSNRFS

SEQ ID NO: 35232 - protein, 9 aa, synthetic construct
  source 1..9: note = Description of Artificial Sequence: Synthetic peptide; note = XENP024425 vlCDR3
FQGSHVPNT

SEQ ID NO: 35233 - protein, 251 aa, synthetic construct
  source 1..251: note = Description of Artificial Sequence: Synthetic polypeptide; note = XENP024426 1C11_H3.178_L3_scFv
QIQLVQSGSELKKPGASVKVSCKASGYTFTHYGMNWVRQAPGQGLEWMGWINTYTGEPTYAPGFKERFVFSLDTSVSTAYLQISSLKAEDTAVYFCARDYYGSSPYWGQGTLVTVSSGKPGSGKPGSGKPGSGKPGSDVLMTQSPDSLAVSLGERATINCKSSQSIVHSNGNTYLEWYQQKPGQSPKLLIYKVSNRFSGVPDRFSGSGSGTDFTLTISSLQAEDVAVYYCFQGSHVPNTFGGGTKVEIKGS

SEQ ID NO: 35234 - protein, 117 aa, synthetic construct
  source 1..117: note = Description of Artificial Sequence: Synthetic polypeptide; note = VH of XENP024426
QIQLVQSGSELKKPGASVKVSCKASGYTFTHYGMNWVRQAPGQGLEWMGWINTYTGEPTYAPGFKERFVFSLDTSVSTAYLQISSLKAEDTAVYFCARDYYGSSPYWGQGTLVTVSS

SEQ ID NO: 35235 - protein, 114 aa, synthetic construct; identical to SEQ ID NO: 33651
  source 1..114: note = Description of Artificial Sequence: Synthetic polypeptide; note = VL of XENP024426

SEQ ID NO: 35236 - protein, 5 aa, synthetic construct
  source 1..5: note = Description of Artificial Sequence: Synthetic peptide; note = XENP024426 vhCDR1
HYGMN

SEQ ID NO: 35237 - protein, 17 aa, synthetic construct
  source 1..17: note = Description of Artificial Sequence: Synthetic peptide; note = XENP024426 vhCDR2
WINTYTGEPTYAPGFKE

SEQ ID NO: 35238 - protein, 8 aa, synthetic construct
  source 1..8: note = Description of Artificial Sequence: Synthetic peptide; note = XENP024426 vhCDR3
DYYGSSPY

SEQ ID NO: 35239 - protein, 16 aa, synthetic construct
  source 1..16: note = Description of Artificial Sequence: Synthetic peptide; note = XENP024426 vlCDR1
KSSQSIVHSNGNTYLE

SEQ ID NO: 35240 - protein, 7 aa, synthetic construct
  source 1..7: note = Description of Artificial Sequence: Synthetic peptide; note = XENP024426 vlCDR2
KVSNRFS

SEQ ID NO: 35241 - protein, 9 aa, synthetic construct
  source 1..9: note = Description of Artificial Sequence: Synthetic peptide; note = XENP024426 vlCDR3
FQGSHVPNT

SEQ ID NO: 35242 - protein, 251 aa, synthetic construct
  source 1..251: note = Description of Artificial Sequence: Synthetic polypeptide; note = XENP024427 1C11_H3.179_L3_scFv
QIQLVQSGSELKKPGASVKVSCKASGYTFTHYGMNWVRQAPGQGLEWMGWINTYTGEPTYAPKFTERFVFSLDTSVSTAYLQISSLKAEDTAVYFCARDYYGSSPYWGQGTLVTVSSGKPGSGKPGSGKPGSGKPGSDVLMTQSPDSLAVSLGERATINCKSSQSIVHSNGNTYLEWYQQKPGQSPKLLIYKVSNRFSGVPDRFSGSGSGTDFTLTISSLQAEDVAVYYCFQGSHVPNTFGGGTKVEIKGS

SEQ ID NO: 35243 - protein, 117 aa, synthetic construct
  source 1..117: note = Description of Artificial Sequence: Synthetic polypeptide; note = VH of XENP024427
QIQLVQSGSELKKPGASVKVSCKASGYTFTHYGMNWVRQAPGQGLEWMGWINTYTGEPTYAPKFTERFVFSLDTSVSTAYLQISSLKAEDTAVYFCARDYYGSSPYWGQGTLVTVSS

SEQ ID NO: 35244 - protein, 114 aa, synthetic construct; identical to SEQ ID NO: 33651
  source 1..114: note = Description of Artificial Sequence: Synthetic polypeptide; note = VL of XENP024427

SEQ ID NO: 35245 - protein, 5 aa, synthetic construct
  source 1..5: note = Description of Artificial Sequence: Synthetic peptide; note = XENP024427 vhCDR1
HYGMN

SEQ ID NO: 35246 - protein, 17 aa, synthetic construct
  source 1..17: note = Description of Artificial Sequence: Synthetic peptide; note = XENP024427 vhCDR2
WINTYTGEPTYAPKFTE

SEQ ID NO: 35247 - protein, 8 aa, synthetic construct
  source 1..8: note = Description of Artificial Sequence: Synthetic peptide; note = XENP024427 vhCDR3
DYYGSSPY

SEQ ID NO: 35248 - protein, 16 aa, synthetic construct
  source 1..16: note = Description of Artificial Sequence: Synthetic peptide; note = XENP024427 vlCDR1
KSSQSIVHSNGNTYLE

SEQ ID NO: 35249 - protein, 7 aa, synthetic construct
  source 1..7: note = Description of Artificial Sequence: Synthetic peptide; note = XENP024427 vlCDR2
KVSNRFS

SEQ ID NO: 35250 - protein, 9 aa, synthetic construct
  source 1..9: note = Description of Artificial Sequence: Synthetic peptide; note = XENP024427 vlCDR3
FQGSHVPNT

SEQ ID NO: 35251 - protein, 251 aa, synthetic construct
  source 1..251: note = Description of Artificial Sequence: Synthetic polypeptide; note = XENP024428 1C11_H3.180_L3_scFv
QIQLVQSGSELKKPGASVKVSCKASGYTFTHYGINWVRQAPGQGLEWMGWINTYTGEPTYADGFTGRFVFSVDTSVSTAYLQISSLKAEDTAVYFCARDYYGSSPYWGQGTLVTVSSGKPGSGKPGSGKPGSGKPGSDVLMTQSPDSLAVSLGERATINCKSSQSIVHSNGNTYLEWYQQKPGQSPKLLIYKVSNRFSGVPDRFSGSGSGTDFTLTISSLQAEDVAVYYCFQGSHVPNTFGGGTKVEIKGS

SEQ ID NO: 35252 - protein, 117 aa, synthetic construct
  source 1..117: note = Description of Artificial Sequence: Synthetic polypeptide; note = VH of XENP024428
QIQLVQSGSELKKPGASVKVSCKASGYTFTHYGINWVRQAPGQGLEWMGWINTYTGEPTYADGFTGRFVFSVDTSVSTAYLQISSLKAEDTAVYFCARDYYGSSPYWGQGTLVTVSS

SEQ ID NO: 35253 - protein, 114 aa, synthetic construct; identical to SEQ ID NO: 33651
  source 1..114: note = Description of Artificial Sequence: Synthetic polypeptide; note = VL of XENP024428

SEQ ID NO: 35254 - protein, 5 aa, synthetic construct
  source 1..5: note = Description of Artificial Sequence: Synthetic peptide; note = XENP024428 vhCDR1
HYGIN

SEQ ID NO: 35255 - protein, 17 aa, synthetic construct
  source 1..17: note = Description of Artificial Sequence: Synthetic peptide; note = XENP024428 vhCDR2
WINTYTGEPTYADGFTG

SEQ ID NO: 35256 - protein, 8 aa, synthetic construct
  source 1..8: note = Description of Artificial Sequence: Synthetic peptide; note = XENP024428 vhCDR3
DYYGSSPY

SEQ ID NO: 35257 - protein, 16 aa, synthetic construct
  source 1..16: note = Description of Artificial Sequence: Synthetic peptide; note = XENP024428 vlCDR1
KSSQSIVHSNGNTYLE

SEQ ID NO: 35258 - protein, 7 aa, synthetic construct
  source 1..7: note = Description of Artificial Sequence: Synthetic peptide; note = XENP024428 vlCDR2
KVSNRFS

SEQ ID NO: 35259 - protein, 9 aa, synthetic construct
  source 1..9: note = Description of Artificial Sequence: Synthetic peptide; note = XENP024428 vlCDR3
FQGSHVPNT

SEQ ID NO: 35260 - protein, 251 aa, synthetic construct
  source 1..251: note = Description of Artificial Sequence: Synthetic polypeptide; note = XENP024429 1C11_H3.181_L3_scFv
QIQLVQSGSELKKPGASVKVSCKASGYTFTHYGINWVRQAPGQGLEWMGWINTYTGEPTYADGFTGRFVFSIDTSVSTAYLQISSLKAEDTAVYFCARDYYGSSPYWGQGTLVTVSSGKPGSGKPGSGKPGSGKPGSDVLMTQSPDSLAVSLGERATINCKSSQSIVHSNGNTYLEWYQQKPGQSPKLLIYKVSNRFSGVPDRFSGSGSGTDFTLTISSLQAEDVAVYYCFQGSHVPNTFGGGTKVEIKGS

SEQ ID NO: 35261 - protein, 117 aa, synthetic construct
  source 1..117: note = Description of Artificial Sequence: Synthetic polypeptide; note = VH of XENP024429
QIQLVQSGSELKKPGASVKVSCKASGYTFTHYGINWVRQAPGQGLEWMGWINTYTGEPTYADGFTGRFVFSIDTSVSTAYLQISSLKAEDTAVYFCARDYYGSSPYWGQGTLVTVSS

SEQ ID NO: 35262 - protein, 114 aa, synthetic construct; identical to SEQ ID NO: 33651
  source 1..114: note = Description of Artificial Sequence: Synthetic polypeptide; note = VL of XENP024429

SEQ ID NO: 35263 - protein, 5 aa, synthetic construct
  source 1..5: note = Description of Artificial Sequence: Synthetic peptide; note = XENP024429 vhCDR1
HYGIN

SEQ ID NO: 35264 - protein, 17 aa, synthetic construct
  source 1..17: note = Description of Artificial Sequence: Synthetic peptide; note = XENP024429 vhCDR2
WINTYTGEPTYADGFTG

SEQ ID NO: 35265 - protein, 8 aa, synthetic construct
  source 1..8: note = Description of Artificial Sequence: Synthetic peptide; note = XENP024429 vhCDR3
DYYGSSPY

SEQ ID NO: 35266 - protein, 16 aa, synthetic construct
  source 1..16: note = Description of Artificial Sequence: Synthetic peptide; note = XENP024429 vlCDR1
KSSQSIVHSNGNTYLE

SEQ ID NO: 35267 - protein, 7 aa, synthetic construct
  source 1..7: note = Description of Artificial Sequence: Synthetic peptide; note = XENP024429 vlCDR2
KVSNRFS

SEQ ID NO: 35268 - protein, 9 aa, synthetic construct
  source 1..9: note = Description of Artificial Sequence: Synthetic peptide; note = XENP024429 vlCDR3
FQGSHVPNT

SEQ ID NO: 35269 - protein, 251 aa, synthetic construct
  source 1..251: note = Description of Artificial Sequence: Synthetic polypeptide; note = XENP024430 1C11_H3.182_L3_scFv
QIQLVQSGSELVKPGESVKVSCKASGYTFTHYGMNWVRQAPGQGLEWMGWINTYTGEPTYADGFTGRFVFSLDTSVSTAYLQISSLKAEDTAVYFCARDYYGSSPYWGQGTLVTVSSGKPGSGKPGSGKPGSGKPGSDVLMTQSPDSLAVSLGERATINCKSSQSIVHSNGNTYLEWYQQKPGQSPKLLIYKVSNRFSGVPDRFSGSGSGTDFTLTISSLQAEDVAVYYCFQGSHVPNTFGGGTKVEIKGS

SEQ ID NO: 35270 - protein, 117 aa, synthetic construct
  source 1..117: note = Description of Artificial Sequence: Synthetic polypeptide; note = VH of XENP024430
QIQLVQSGSELVKPGESVKVSCKASGYTFTHYGMNWVRQAPGQGLEWMGWINTYTGEPTYADGFTGRFVFSLDTSVSTAYLQISSLKAEDTAVYFCARDYYGSSPYWGQGTLVTVSS

SEQ ID NO: 35271 - protein, 114 aa, synthetic construct; identical to SEQ ID NO: 33651
  source 1..114: note = Description of Artificial Sequence: Synthetic polypeptide; note = VL of XENP024430

SEQ ID NO: 35272 - protein, 5 aa, synthetic construct
  source 1..5: note = Description of Artificial Sequence: Synthetic peptide; note = XENP024430 vhCDR1
HYGMN

SEQ ID NO: 35273 - protein, 17 aa, synthetic construct
  source 1..17: note = Description of Artificial Sequence: Synthetic peptide; note = XENP024430 vhCDR2
WINTYTGEPTYADGFTG

SEQ ID NO: 35274 - protein, 8 aa, synthetic construct
  source 1..8: note = Description of Artificial Sequence: Synthetic peptide; note = XENP024430 vhCDR3
DYYGSSPY

SEQ ID NO: 35275 - protein, 16 aa, synthetic construct
  source 1..16: note = Description of Artificial Sequence: Synthetic peptide; note = XENP024430 vlCDR1
KSSQSIVHSNGNTYLE

SEQ ID NO: 35276 - protein, 7 aa, synthetic construct
  source 1..7: note = Description of Artificial Sequence: Synthetic peptide; note = XENP024430 vlCDR2
KVSNRFS

SEQ ID NO: 35277 - protein, 9 aa, synthetic construct
  source 1..9: note = Description of Artificial Sequence: Synthetic peptide; note = XENP024430 vlCDR3
FQGSHVPNT

SEQ ID NO: 35278 - protein, 251 aa, synthetic construct
  source 1..251: note = Description of Artificial Sequence: Synthetic polypeptide; note = XENP024431 1C11_H3.183_L3_scFv
QIQLVQSGSVLKKPGESVKVSCKASGYTFTHYGMNWVRQAPGQGLEWMGWINTYTGEPTYADGFTGRFVFSLDTSVSTAYLQISSLKAEDTAVYFCARDYYGSSPYWGQGTLVTVSSGKPGSGKPGSGKPGSGKPGSDVLMTQSPDSLAVSLGERATINCKSSQSIVHSNGNTYLEWYQQKPGQSPKLLIYKVSNRFSGVPDRFSGSGSGTDFTLTISSLQAEDVAVYYCFQGSHVPNTFGGGTKVEIKGS

SEQ ID NO: 35279 - protein, 117 aa, synthetic construct
  source 1..117: note = Description of Artificial Sequence: Synthetic polypeptide; note = VH of XENP024431
QIQLVQSGSVLKKPGESVKVSCKASGYTFTHYGMNWVRQAPGQGLEWMGWINTYTGEPTYADGFTGRFVFSLDTSVSTAYLQISSLKAEDTAVYFCARDYYGSSPYWGQGTLVTVSS

SEQ ID NO: 35280 - protein, 114 aa, synthetic construct; identical to SEQ ID NO: 33651
  source 1..114: note = Description of Artificial Sequence: Synthetic polypeptide; note = VL of XENP024431

SEQ ID NO: 35281 - protein, 5 aa, synthetic construct
  source 1..5: note = Description of Artificial Sequence: Synthetic peptide; note = XENP024431 vhCDR1
HYGMN

SEQ ID NO: 35282 - protein, 17 aa, synthetic construct
  source 1..17: note = Description of Artificial Sequence: Synthetic peptide; note = XENP024431 vhCDR2
WINTYTGEPTYADGFTG

SEQ ID NO: 35283 - protein, 8 aa, synthetic construct
  source 1..8: note = Description of Artificial Sequence: Synthetic peptide; note = XENP024431 vhCDR3
DYYGSSPY

SEQ ID NO: 35284 - protein, 16 aa, synthetic construct
  source 1..16: note = Description of Artificial Sequence: Synthetic peptide; note = XENP024431 vlCDR1
KSSQSIVHSNGNTYLE

SEQ ID NO: 35285 - protein, 7 aa, synthetic construct
  source 1..7: note = Description of Artificial Sequence: Synthetic peptide; note = XENP024431 vlCDR2
KVSNRFS

SEQ ID NO: 35286 - protein, 9 aa, synthetic construct
  source 1..9: note = Description of Artificial Sequence: Synthetic peptide; note = XENP024431 vlCDR3
FQGSHVPNT

SEQ ID NO: 35287 - protein, 251 aa, synthetic construct
  source 1..251: note = Description of Artificial Sequence: Synthetic polypeptide; note = XENP024432 1C11_H3.184_L3_scFv
QIQLVQSGSVLVKPGESVKVSCKASGYTFTHYGMNWVRQAPGQGLEWMGWINTYTGEPTYADGFTGRFVFSLDTSVSTAYLQISSLKAEDTAVYFCARDYYGSSPYWGQGTLVTVSSGKPGSGKPGSGKPGSGKPGSDVLMTQSPDSLAVSLGERATINCKSSQSIVHSNGNTYLEWYQQKPGQSPKLLIYKVSNRFSGVPDRFSGSGSGTDFTLTISSLQAEDVAVYYCFQGSHVPNTFGGGTKVEIKGS

SEQ ID NO: 35288 - protein, 117 aa, synthetic construct
  source 1..117: note = Description of Artificial Sequence: Synthetic polypeptide; note = VH of XENP024432
QIQLVQSGSVLVKPGESVKVSCKASGYTFTHYGMNWVRQAPGQGLEWMGWINTYTGEPTYADGFTGRFVFSLDTSVSTAYLQISSLKAEDTAVYFCARDYYGSSPYWGQGTLVTVSS

SEQ ID NO: 35289 - protein, 114 aa, synthetic construct; identical to SEQ ID NO: 33651
  source 1..114: note = Description of Artificial Sequence: Synthetic polypeptide; note = VL of XENP024432

SEQ ID NO: 35290 - protein, 5 aa, synthetic construct
  source 1..5: note = Description of Artificial Sequence: Synthetic peptide; note = XENP024432 vhCDR1
HYGMN

SEQ ID NO: 35291 - protein, 17 aa, synthetic construct
  source 1..17: note = Description of Artificial Sequence: Synthetic peptide; note = XENP024432 vhCDR2
WINTYTGEPTYADGFTG

SEQ ID NO: 35292 - protein, 8 aa, synthetic construct
  source 1..8: note = Description of Artificial Sequence: Synthetic peptide; note = XENP024432 vhCDR3
DYYGSSPY

SEQ ID NO: 35293 - protein, 16 aa, synthetic construct
  source 1..16: note = Description of Artificial Sequence: Synthetic peptide; note = XENP024432 vlCDR1
KSSQSIVHSNGNTYLE

SEQ ID NO: 35294 - protein, 7 aa, synthetic construct
  source 1..7: note = Description of Artificial Sequence: Synthetic peptide; note = XENP024432 vlCDR2
KVSNRFS

SEQ ID NO: 35295 - protein, 9 aa, synthetic construct
  source 1..9: note = Description of Artificial Sequence: Synthetic peptide; note = XENP024432 vlCDR3
FQGSHVPNT

SEQ ID NO: 35296 - protein, 251 aa, synthetic construct
  source 1..251: note = Description of Artificial Sequence: Synthetic polypeptide; note = XENP024433 1C11_H3.185_L3_scFv
EVQLVQSGSELVKPGESVKVSCKASGYTFTHYGINWVRQPPGQGLEWIGWINTYTGEPYYAPKFTERFVFSLDTSQDTAYLQINSLKAEDTAVYYCARDYYGSSPYWGQGTLVTVSSGKPGSGKPGSGKPGSGKPGSDVLMTQSPDSLAVSLGERATINCKSSQSIVHSNGNTYLEWYQQKPGQSPKLLIYKVSNRFSGVPDRFSGSGSGTDFTLTISSLQAEDVAVYYCFQGSHVPNTFGGGTKVEIKGS

SEQ ID NO: 35297 - protein, 117 aa, synthetic construct
  source 1..117: note = Description of Artificial Sequence: Synthetic polypeptide; note = VH of XENP024433
EVQLVQSGSELVKPGESVKVSCKASGYTFTHYGINWVRQPPGQGLEWIGWINTYTGEPYYAPKFTERFVFSLDTSQDTAYLQINSLKAEDTAVYYCARDYYGSSPYWGQGTLVTVSS

SEQ ID NO: 35298 - protein, 114 aa, synthetic construct; identical to SEQ ID NO: 33651
  source 1..114: note = Description of Artificial Sequence: Synthetic polypeptide; note = VL of XENP024433

SEQ ID NO: 35299 - protein, 5 aa, synthetic construct
  source 1..5: note = Description of Artificial Sequence: Synthetic peptide; note = XENP024433 vhCDR1
HYGIN

SEQ ID NO: 35300 - protein, 17 aa, synthetic construct
  source 1..17: note = Description of Artificial Sequence: Synthetic peptide; note = XENP024433 vhCDR2
WINTYTGEPYYAPKFTE

SEQ ID NO: 35301 - protein, 8 aa, synthetic construct
  source 1..8: note = Description of Artificial Sequence: Synthetic peptide; note = XENP024433 vhCDR3
DYYGSSPY

SEQ ID NO: 35302 - protein, 16 aa, synthetic construct
  source 1..16: note = Description of Artificial Sequence: Synthetic peptide; note = XENP024433 vlCDR1
KSSQSIVHSNGNTYLE

SEQ ID NO: 35303 - protein, 7 aa, synthetic construct
  source 1..7: note = Description of Artificial Sequence: Synthetic peptide; note = XENP024433 vlCDR2
KVSNRFS

SEQ ID NO: 35304 - protein, 9 aa, synthetic construct
  source 1..9: note = Description of Artificial Sequence: Synthetic peptide; note = XENP024433 vlCDR3
FQGSHVPNT

SEQ ID NO: 35305 - protein, 251 aa, synthetic construct
  source 1..251: note = Description of Artificial Sequence: Synthetic polypeptide; note = XENP024434 1C11_H3.186_L3_scFv
EVQLVQSGSELVKPGESVKVSCKASGYTFTHYGINWVRQPPGQGLEWMGWINTYTGEPYYAPGFTERFVFSLDTSVDTAYLQINSLKAEDTAVYYCARDYYGSSPYWGQGTLVTVSSGKPGSGKPGSGKPGSGKPGSDVLMTQSPDSLAVSLGERATINCKSSQSIVHSNGNTYLEWYQQKPGQSPKLLIYKVSNRFSGVPDRFSGSGSGTDFTLTISSLQAEDVAVYYCFQGSHVPNTFGGGTKVEIKGS

SEQ ID NO: 35306 - protein, 117 aa, synthetic construct
  source 1..117: note = Description of Artificial Sequence: Synthetic polypeptide; note = VH of XENP024434
EVQLVQSGSELVKPGESVKVSCKASGYTFTHYGINWVRQPPGQGLEWMGWINTYTGEPYYAPGFTERFVFSLDTSVDTAYLQINSLKAEDTAVYYCARDYYGSSPYWGQGTLVTVSS

SEQ ID NO: 35307 - protein, 114 aa, synthetic construct; identical to SEQ ID NO: 33651
  source 1..114: note = Description of Artificial Sequence: Synthetic polypeptide; note = VL of XENP024434

SEQ ID NO: 35308 - protein, 5 aa, synthetic construct
  source 1..5: note = Description of Artificial Sequence: Synthetic peptide; note = XENP024434 vhCDR1
HYGIN

SEQ ID NO: 35309 - protein, 17 aa, synthetic construct
  source 1..17: note = Description of Artificial Sequence: Synthetic peptide; note = XENP024434 vhCDR2
WINTYTGEPYYAPGFTE

SEQ ID NO: 35310 - protein, 8 aa, synthetic construct
  source 1..8: note = Description of Artificial Sequence: Synthetic peptide; note = XENP024434 vhCDR3
DYYGSSPY

SEQ ID NO: 35311 - protein, 16 aa, synthetic construct
  source 1..16: note = Description of Artificial Sequence: Synthetic peptide; note = XENP024434 vlCDR1
KSSQSIVHSNGNTYLE

SEQ ID NO: 35312 - protein, 7 aa, synthetic construct
  source 1..7: note = Description of Artificial Sequence: Synthetic peptide; note = XENP024434 vlCDR2
KVSNRFS

SEQ ID NO: 35313 - protein, 9 aa, synthetic construct
  source 1..9: note = Description of Artificial Sequence: Synthetic peptide; note = XENP024434 vlCDR3
FQGSHVPNT

SEQ ID NO: 35314 - protein, 251 aa, synthetic construct
  source 1..251: note = Description of Artificial Sequence: Synthetic polypeptide; note = XENP024435 1C11_H3.187_L3_scFv
QVQLVQSGSELVKPGESVKVSCKASGYTFTHYGINWVRQPPGQGLEWMGWINTYTGEPYYAPGFTERFVFSLDTSQSTAYLQINSLKAEDTAVYYCARDYYGSSPYWGQGTLVTVSSGKPGSGKPGSGKPGSGKPGSDVLMTQSPDSLAVSLGERATINCKSSQSIVHSNGNTYLEWYQQKPGQSPKLLIYKVSNRFSGVPDRFSGSGSGTDFTLTISSLQAEDVAVYYCFQGSHVPNTFGGGTKVEIKGS

SEQ ID NO: 35315 - protein, 117 aa, synthetic construct
  source 1..117: note = Description of Artificial Sequence: Synthetic polypeptide; note = VH of XENP024435
QVQLVQSGSELVKPGESVKVSCKASGYTFTHYGINWVRQPPGQGLEWMGWINTYTGEPYYAPGFTERFVFSLDTSQSTAYLQINSLKAEDTAVYYCARDYYGSSPYWGQGTLVTVSS

SEQ ID NO: 35316 - protein, 114 aa, synthetic construct; identical to SEQ ID NO: 33651
  source 1..114: note = Description of Artificial Sequence: Synthetic polypeptide; note = VL of XENP024435

SEQ ID NO: 35317 - protein, 5 aa, synthetic construct
  source 1..5: note = Description of Artificial Sequence: Synthetic peptide; note = XENP024435 vhCDR1
HYGIN

SEQ ID NO: 35318 - protein, 17 aa, synthetic construct
  source 1..17: note = Description of Artificial Sequence: Synthetic peptide; note = XENP024435 vhCDR2
WINTYTGEPYYAPGFTE

SEQ ID NO: 35319 - protein, 8 aa, synthetic construct
  source 1..8: note = Description of Artificial Sequence: Synthetic peptide; note = XENP024435 vhCDR3
DYYGSSPY

SEQ ID NO: 35320 - protein, 16 aa, synthetic construct
  source 1..16: note = Description of Artificial Sequence: Synthetic peptide; note = XENP024435 vlCDR1
KSSQSIVHSNGNTYLE

SEQ ID NO: 35321 - protein, 7 aa, synthetic construct
  source 1..7: note = Description of Artificial Sequence: Synthetic peptide; note = XENP024435 vlCDR2
KVSNRFS

SEQ ID NO: 35322 - protein, 9 aa, synthetic construct
  source 1..9: note = Description of Artificial Sequence: Synthetic peptide; note = XENP024435 vlCDR3
FQGSHVPNT

SEQ ID NO: 35323 - protein, 251 aa, synthetic construct
  source 1..251: note = Description of Artificial Sequence: Synthetic polypeptide; note = XENP024436 1C11_H3.188_L3_scFv
QVQLVQSGSELKKPGESVKVSCKASGYTFTHYGINWVRQPPGQGLEWIGWINTYTGEPYYAPGFTGRFVFSLDTSQSTAYLQINSLKAEDTAVYYCARDYYGSSPYWGQGTLVTVSSGKPGSGKPGSGKPGSGKPGSDVLMTQSPDSLAVSLGERATINCKSSQSIVHSNGNTYLEWYQQKPGQSPKLLIYKVSNRFSGVPDRFSGSGSGTDFTLTISSLQAEDVAVYYCFQGSHVPNTFGGGTKVEIKGS

SEQ ID NO: 35324 - protein, 117 aa, synthetic construct
  source 1..117: note = Description of Artificial Sequence: Synthetic polypeptide; note = VH of XENP024436
QVQLVQSGSELKKPGESVKVSCKASGYTFTHYGINWVRQPPGQGLEWIGWINTYTGEPYYAPGFTGRFVFSLDTSQSTAYLQINSLKAEDTAVYYCARDYYGSSPYWGQGTLVTVSS

SEQ ID NO: 35325 - protein, 114 aa, synthetic construct; identical to SEQ ID NO: 33651
  source 1..114: note = Description of Artificial Sequence: Synthetic polypeptide; note = VL of XENP024436

SEQ ID NO: 35326 - protein, 5 aa, synthetic construct
  source 1..5: note = Description of Artificial Sequence: Synthetic peptide; note = XENP024436 vhCDR1
HYGIN

SEQ ID NO: 35327 - protein, 17 aa, synthetic construct
  source 1..17: note = Description of Artificial Sequence: Synthetic peptide; note = XENP024436 vhCDR2
WINTYTGEPYYAPGFTG

SEQ ID NO: 35328 - protein, 8 aa, synthetic construct
  source 1..8: note = Description of Artificial Sequence: Synthetic peptide; note = XENP024436 vhCDR3
DYYGSSPY

SEQ ID NO: 35329 - protein, 16 aa, synthetic construct
  source 1..16: note = Description of Artificial Sequence: Synthetic peptide; note = XENP024436 vlCDR1
KSSQSIVHSNGNTYLE

SEQ ID NO: 35330 - protein, 7 aa, synthetic construct
  source 1..7: note = Description of Artificial Sequence: Synthetic peptide; note = XENP024436 vlCDR2
KVSNRFS

SEQ ID NO: 35331 - protein, 9 aa, synthetic construct
  source 1..9: note = Description of Artificial Sequence: Synthetic peptide; note = XENP024436 vlCDR3
FQGSHVPNT

SEQ ID NO: 35332 - protein, 251 aa, synthetic construct
  source 1..251: note = Description of Artificial Sequence: Synthetic polypeptide; note = XENP024437 1C11_H3.189_L3_scFv
QVQLVQSGSELKKPGASVKVSCKASGYTFTHYGINWVRQPPGQGLEWIGWINTYTGEPYYAPKFTGRFVFSLDTSVSTAYLQINSLKAEDTAVYYCARDYYGSSPYWGQGTLVTVSSGKPGSGKPGSGKPGSGKPGSDVLMTQSPDSLAVSLGERATINCKSSQSIVHSNGNTYLEWYQQKPGQSPKLLIYKVSNRFSGVPDRFSGSGSGTDFTLTISSLQAEDVAVYYCFQGSHVPNTFGGGTKVEIKGS

SEQ ID NO: 35333 - protein, 117 aa, synthetic construct
  source 1..117: note = Description of Artificial Sequence: Synthetic polypeptide; note = VH of XENP024437
QVQLVQSGSELKKPGASVKVSCKASGYTFTHYGINWVRQPPGQGLEWIGWINTYTGEPYYAPKFTGRFVFSLDTSVSTAYLQINSLKAEDTAVYYCARDYYGSSPYWGQGTLVTVSS

SEQ ID NO: 35334 - protein, 114 aa, synthetic construct; identical to SEQ ID NO: 33651
  source 1..114: note = Description of Artificial Sequence: Synthetic polypeptide; note = VL of XENP024437

SEQ ID NO: 35335 - protein, 5 aa, synthetic construct
  source 1..5: note = Description of Artificial Sequence: Synthetic peptide; note = XENP024437 vhCDR1
HYGIN

SEQ ID NO: 35336 - protein, 17 aa, synthetic construct
  source 1..17: note = Description of Artificial Sequence: Synthetic peptide; note = XENP024437 vhCDR2
WINTYTGEPYYAPKFTG

SEQ ID NO: 35337 - protein, 8 aa, synthetic construct
  source 1..8: note = Description of Artificial Sequence: Synthetic peptide; note = XENP024437 vhCDR3
DYYGSSPY

SEQ ID NO: 35338 - protein, 16 aa, synthetic construct
  source 1..16: note = Description of Artificial Sequence: Synthetic peptide; note = XENP024437 vlCDR1
KSSQSIVHSNGNTYLE

SEQ ID NO: 35339 - protein, 7 aa, synthetic construct
  source 1..7: note = Description of Artificial Sequence: Synthetic peptide; note = XENP024437 vlCDR2
KVSNRFS

SEQ ID NO: 35340 - protein, 9 aa, synthetic construct
  source 1..9: note = Description of Artificial Sequence: Synthetic peptide; note = XENP024437 vlCDR3
FQGSHVPNT

SEQ ID NO: 35341 - protein, 251 aa, synthetic construct
  source 1..251: note = Description of Artificial Sequence: Synthetic polypeptide; note = XENP024438 1C11_H3.190_L3_scFv
QVQLVQSGSVLKKPGGSVKVSCKASGYTFTHYGINWVRQPPGQGLEWIGWINTYTGEPYYAPGFTGRFVFSLDTSQSTAYLQINSLKAEDTAVYYCARDYYGSSPYWGQGTLVTVSSGKPGSGKPGSGKPGSGKPGSDVLMTQSPDSLAVSLGERATINCKSSQSIVHSNGNTYLEWYQQKPGQSPKLLIYKVSNRFSGVPDRFSGSGSGTDFTLTISSLQAEDVAVYYCFQGSHVPNTFGGGTKVEIKGS

SEQ ID NO: 35342 - protein, 117 aa, synthetic construct
  source 1..117: note = Description of Artificial Sequence: Synthetic polypeptide; note = VH of XENP024438
QVQLVQSGSVLKKPGGSVKVSCKASGYTFTHYGINWVRQPPGQGLEWIGWINTYTGEPYYAPGFTGRFVFSLDTSQSTAYLQINSLKAEDTAVYYCARDYYGSSPYWGQGTLVTVSS

SEQ ID NO: 35343 - protein, 114 aa, synthetic construct; identical to SEQ ID NO: 33651
  source 1..114: note = Description of Artificial Sequence: Synthetic polypeptide; note = VL of XENP024438

SEQ ID NO: 35344 - protein, 5 aa, synthetic construct
  source 1..5: note = Description of Artificial Sequence: Synthetic peptide; note = XENP024438 vhCDR1
HYGIN

SEQ ID NO: 35345 - protein, 17 aa, synthetic construct
  source 1..17: note = Description of Artificial Sequence: Synthetic peptide; note = XENP024438 vhCDR2
WINTYTGEPYYAPGFTG

SEQ ID NO: 35346 - protein, 8 aa, synthetic construct
  source 1..8: note = Description of Artificial Sequence: Synthetic peptide; note = XENP024438 vhCDR3
DYYGSSPY

SEQ ID NO: 35347 - protein, 16 aa, synthetic construct
  source 1..16: note = Description of Artificial Sequence: Synthetic peptide; note = XENP024438 vlCDR1
KSSQSIVHSNGNTYLE

SEQ ID NO: 35348 - protein, 7 aa, synthetic construct
  source 1..7: note = Description of Artificial Sequence: Synthetic peptide; note = XENP024438 vlCDR2
KVSNRFS

SEQ ID NO: 35349 - protein, 9 aa, synthetic construct
  source 1..9: note = Description of Artificial Sequence: Synthetic peptide; note = XENP024438 vlCDR3
FQGSHVPNT

SEQ ID NO: 35350 - protein, 251 aa, synthetic construct
  source 1..251: note = Description of Artificial Sequence: Synthetic polypeptide; note = XENP024439 1C11_H3.191_L3_scFv
QVQLVQSGSELVKPGESVKVSCKASGYTFTHYGMNWVRQAPGQGLEWMGWINTYTGEPTYAPGFTGRFVFSLDTSQSTAYLQINSLKAEDTAVYFCARDYYGSSPYWGQGTLVTVSSGKPGSGKPGSGKPGSGKPGSDVLMTQSPDSLAVSLGERATINCKSSQSIVHSNGNTYLEWYQQKPGQSPKLLIYKVSNRFSGVPDRFSGSGSGTDFTLTISSLQAEDVAVYYCFQGSHVPNTFGGGTKVEIKGS

SEQ ID NO: 35351 - protein, 117 aa, synthetic construct
  source 1..117: note = Description of Artificial Sequence: Synthetic polypeptide; note = VH of XENP024439
QVQLVQSGSELVKPGESVKVSCKASGYTFTHYGMNWVRQAPGQGLEWMGWINTYTGEPTYAPGFTGRFVFSLDTSQSTAYLQINSLKAEDTAVYFCARDYYGSSPYWGQGTLVTVSS

SEQ ID NO: 35352 - protein, 114 aa, synthetic construct; identical to SEQ ID NO: 33651
  source 1..114: note = Description of Artificial Sequence: Synthetic polypeptide; note = VL of XENP024439

SEQ ID NO: 35353 - protein, 5 aa, synthetic construct
  source 1..5: note = Description of Artificial Sequence: Synthetic peptide; note = XENP024439 vhCDR1
HYGMN

SEQ ID NO: 35354 - protein, 17 aa, synthetic construct
  source 1..17: note = Description of Artificial Sequence: Synthetic peptide; note = XENP024439 vhCDR2
WINTYTGEPTYAPGFTG

SEQ ID NO: 35355 - protein, 8 aa, synthetic construct
  source 1..8: note = Description of Artificial Sequence: Synthetic peptide; note = XENP024439 vhCDR3
DYYGSSPY

SEQ ID NO: 35356 - protein, 16 aa, synthetic construct
  source 1..16: note = Description of Artificial Sequence: Synthetic peptide; note = XENP024439 vlCDR1
KSSQSIVHSNGNTYLE

SEQ ID NO: 35357 - protein, 7 aa, synthetic construct
  source 1..7: note = Description of Artificial Sequence: Synthetic peptide; note = XENP024439 vlCDR2
KVSNRFS

SEQ ID NO: 35358 - protein, 9 aa, synthetic construct
  source 1..9: note = Description of Artificial Sequence: Synthetic peptide; note = XENP024439 vlCDR3
FQGSHVPNT

SEQ ID NO: 35359 - protein, 251 aa, synthetic construct
  source 1..251: note = Description of Artificial Sequence: Synthetic polypeptide; note = XENP024440 1C11_H3.192_L3_scFv
EVQLVQSGSVLKKPGESVKVSCKASGYTFTHYGINWVRQAPGQGLEWMGWINTYTGEPTYADGFTERFVFSLDTSVSTAYLQISSLKAEDTAVYFCARDYYGSSPYWGQGTLVTVSSGKPGSGKPGSGKPGSGKPGSDVLMTQSPDSLAVSLGERATINCKSSQSIVHSNGNTYLEWYQQKPGQSPKLLIYKVSNRFSGVPDRFSGSGSGTDFTLTISSLQAEDVAVYYCFQGSHVPNTFGGGTKVEIKGS

SEQ ID NO: 35360 - protein, 117 aa, synthetic construct
  source 1..117: note = Description of Artificial Sequence: Synthetic polypeptide; note = VH of XENP024440
EVQLVQSGSVLKKPGESVKVSCKASGYTFTHYGINWVRQAPGQGLEWMGWINTYTGEPTYADGFTERFVFSLDTSVSTAYLQISSLKAEDTAVYFCARDYYGSSPYWGQGTLVTVSS

SEQ ID NO: 35361 - protein, 114 aa, synthetic construct; identical to SEQ ID NO: 33651
  source 1..114: note = Description of Artificial Sequence: Synthetic polypeptide; note = VL of XENP024440

SEQ ID NO: 35362 - protein, 5 aa, synthetic construct
  source 1..5: note = Description of Artificial Sequence: Synthetic peptide; note = XENP024440 vhCDR1
HYGIN

SEQ ID NO: 35363 - protein, 17 aa, synthetic construct
  source 1..17: note = Description of Artificial Sequence: Synthetic peptide; note = XENP024440 vhCDR2
WINTYTGEPTYADGFTE

SEQ ID NO: 35364 - protein, 8 aa, synthetic construct
  source 1..8: note = Description of Artificial Sequence: Synthetic peptide; note = XENP024440 vhCDR3
DYYGSSPY

SEQ ID NO: 35365 - protein, 16 aa, synthetic construct
  source 1..16: note = Description of Artificial Sequence: Synthetic peptide; note = XENP024440 vlCDR1
KSSQSIVHSNGNTYLE

SEQ ID NO: 35366 - protein, 7 aa, synthetic construct
  source 1..7: note = Description of Artificial Sequence: Synthetic peptide; note = XENP024440 vlCDR2
KVSNRFS

SEQ ID NO: 35367 - protein, 9 aa, synthetic construct
  source 1..9: note = Description of Artificial Sequence: Synthetic peptide; note = XENP024440 vlCDR3
FQGSHVPNT

SEQ ID NO: 35368 - protein, 251 aa, synthetic construct
  source 1..251: note = Description of Artificial Sequence: Synthetic polypeptide; note = XENP024441 1C11_H3.193_L3_scFv
QIQLVQSGSELKKPGASVKVSCKASGYTFTHYGMNWVRQPPGQGLEWIGWINTYTGEPTYAPGFTERFVFSLDTSQSTAYLQINSLKAEDTAVYYCARDYYGSSPYWGQGTLVTVSSGKPGSGKPGSGKPGSGKPGSDVLMTQSPDSLAVSLGERATINCKSSQSIVHSNGNTYLEWYQQKPGQSPKLLIYKVSNRFSGVPDRFSGSGSGTDFTLTISSLQAEDVAVYYCFQGSHVPNTFGGGTKVEIKGS

SEQ ID NO: 35369 - protein, 117 aa, synthetic construct
  source 1..117: note = Description of Artificial Sequence: Synthetic polypeptide; note = VH of XENP024441
QIQLVQSGSELKKPGASVKVSCKASGYTFTHYGMNWVRQPPGQGLEWIGWINTYTGEPTYAPGFTERFVFSLDTSQSTAYLQINSLKAEDTAVYYCARDYYGSSPYWGQGTLVTVSS

SEQ ID NO: 35370 - protein, 114 aa, synthetic construct; identical to SEQ ID NO: 33651
  source 1..114: note = Description of Artificial Sequence: Synthetic polypeptide; note = VL of XENP024441

SEQ ID NO: 35371 - protein, 5 aa, synthetic construct
  source 1..5: note = Description of Artificial Sequence: Synthetic peptide; note = XENP024441 vhCDR1
HYGMN

SEQ ID NO: 35372 - protein, 17 aa, synthetic construct
  source 1..17: note = Description of Artificial Sequence: Synthetic peptide; note = XENP024441 vhCDR2
WINTYTGEPTYAPGFTE

SEQ ID NO: 35373 - protein, 8 aa, synthetic construct
  source 1..8: note = Description of Artificial Sequence: Synthetic peptide; note = XENP024441 vhCDR3
DYYGSSPY

SEQ ID NO: 35374 - protein, 16 aa, synthetic construct
  source 1..16: note = Description of Artificial Sequence: Synthetic peptide; note = XENP024441 vlCDR1
KSSQSIVHSNGNTYLE

SEQ ID NO: 35375 - protein, 7 aa, synthetic construct
  source 1..7: note = Description of Artificial Sequence: Synthetic peptide; note = XENP024441 vlCDR2
KVSNRFS

SEQ ID NO: 35376 - protein, 9 aa, synthetic construct
  source 1..9: note = Description of Artificial Sequence: Synthetic peptide; note = XENP024441 vlCDR3
FQGSHVPNT

SEQ ID NO: 35377 - protein, 251 aa, synthetic construct
  source 1..251: note = Description of Artificial Sequence: Synthetic polypeptide; note = XENP024442 1C11_H3.194_L3_scFv
EIQLVQSGSVLKKPGASVKVSCKASGYTFTHYGINWVRQAPGQGLEWIGWINTYTGEPTYADGFTGRFVFSLDTSVSTAYLQISSLKAEDTAVYFCARDYYGSSPYWGQGTLVTVSSGKPGSGKPGSGKPGSGKPGSDVLMTQSPDSLAVSLGERATINCKSSQSIVHSNGNTYLEWYQQKPGQSPKLLIYKVSNRFSGVPDRFSGSGSGTDFTLTISSLQAEDVAVYYCFQGSHVPNTFGGGTKVEIKGS

SEQ ID NO: 35378 - protein, 117 aa, synthetic construct
  source 1..117: note = Description of Artificial Sequence: Synthetic polypeptide; note = VH of XENP024442
EIQLVQSGSVLKKPGASVKVSCKASGYTFTHYGINWVRQAPGQGLEWIGWINTYTGEPTYADGFTGRFVFSLDTSVSTAYLQISSLKAEDTAVYFCARDYYGSSPYWGQGTLVTVSS

SEQ ID NO: 35379 - protein, 114 aa, synthetic construct; identical to SEQ ID NO: 33651
  source 1..114: note = Description of Artificial Sequence: Synthetic polypeptide; note = VL of XENP024442

SEQ ID NO: 35380 - protein, 5 aa, synthetic construct
  source 1..5: note = Description of Artificial Sequence: Synthetic peptide; note = XENP024442 vhCDR1
HYGIN

SEQ ID NO: 35381 - protein, 17 aa, synthetic construct
  source 1..17: note = Description of Artificial Sequence: Synthetic peptide; note = XENP024442 vhCDR2
WINTYTGEPTYADGFTG

SEQ ID NO: 35382 - protein, 8 aa, synthetic construct
  source 1..8: note = Description of Artificial Sequence: Synthetic peptide; note = XENP024442 vhCDR3
DYYGSSPY

SEQ ID NO: 35383 - protein, 16 aa, synthetic construct
  source 1..16: note = Description of Artificial Sequence: Synthetic peptide; note = XENP024442 vlCDR1
KSSQSIVHSNGNTYLE

SEQ ID NO: 35384 - protein, 7 aa, synthetic construct
  source 1..7: note = Description of Artificial Sequence: Synthetic peptide; note = XENP024442 vlCDR2
KVSNRFS

SEQ ID NO: 35385 - protein, 9 aa, synthetic construct
  source 1..9: note = Description of Artificial Sequence: Synthetic peptide; note = XENP024442 vlCDR3
FQGSHVPNT

SEQ ID NO: 35386 - protein, 251 aa, synthetic construct
  source 1..251: note = Description of Artificial Sequence: Synthetic polypeptide; note = XENP024443 1C11_H3.195_L3_scFv
QIQLVQSGSELKKPGASVKVSCKASGYTFTHYGMNWVRQPPGQGLEWMGWINTYTGEPYYADGFTGRFVFSLDTSVDTAYLQINSLKAEDTAVYFCARDYYGSSPYWGQGTLVTVSSGKPGSGKPGSGKPGSGKPGSDVLMTQSPDSLAVSLGERATINCKSSQSIVHSNGNTYLEWYQQKPGQSPKLLIYKVSNRFSGVPDRFSGSGSGTDFTLTISSLQAEDVAVYYCFQGSHVPNTFGGGTKVEIKGS

SEQ ID NO: 35387 - protein, 117 aa, synthetic construct
  source 1..117: note = Description of Artificial Sequence: Synthetic polypeptide; note = VH of XENP024443
QIQLVQSGSELKKPGASVKVSCKASGYTFTHYGMNWVRQPPGQGLEWMGWINTYTGEPYYADGFTGRFVFSLDTSVDTAYLQINSLKAEDTAVYFCARDYYGSSPYWGQGTLVTVSS

SEQ ID NO: 35388 - protein, 114 aa, synthetic construct; identical to SEQ ID NO: 33651
  source 1..114: note = Description of Artificial Sequence: Synthetic polypeptide; note = VL of XENP024443

SEQ ID NO: 35389 - protein, 5 aa, synthetic construct
  source 1..5: note = Description of Artificial Sequence: Synthetic peptide; note = XENP024443 vhCDR1
HYGMN

SEQ ID NO: 35390 - protein, 17 aa, synthetic construct
  source 1..17: note = Description of Artificial Sequence: Synthetic peptide; note = XENP024443 vhCDR2
WINTYTGEPYYADGFTG

SEQ ID NO: 35391 - protein, 8 aa, synthetic construct
  source 1..8: note = Description of Artificial Sequence: Synthetic peptide; note = XENP024443 vhCDR3
DYYGSSPY

SEQ ID NO: 35392 - protein, 16 aa, synthetic construct
  source 1..16: note = Description of Artificial Sequence: Synthetic peptide; note = XENP024443 vlCDR1
KSSQSIVHSNGNTYLE

SEQ ID NO: 35393 - protein, 7 aa, synthetic construct
  source 1..7: note = Description of Artificial Sequence: Synthetic peptide; note = XENP024443 vlCDR2
KVSNRFS

SEQ ID NO: 35394 - protein, 9 aa, synthetic construct
  source 1..9: note = Description of Artificial Sequence: Synthetic peptide; note = XENP024443 vlCDR3
FQGSHVPNT

SEQ ID NO: 35395 - protein, 231 aa, synthetic construct
  source 1..231: note = Description of Artificial Sequence: Synthetic polypeptide; note = XENP022835 empty-[CTLA-4]_H3.23_L0.129_scFv Empty-Fc Heavy Chain
EPKSSDKTHTCPPCPAPPVAGPSVFLFPPKPKDTLMISRTPEVTCVVVDVKHEDPEVKFNWYVDGVEVHNAKTKPREEEYNSTYRVVSVLTVLHQDWLNGKEYKCKVSNKALPAPIEKTISKAKGQPREPQVYTLPPSREEMTKNQVSLTCDVSGFYPSDIAVEWESDGQPENNYKTTPPVLDSDGSFFLYSKLTVDKSRWEQGDVFSCSVMHEALHNHYTQKSLSLSPGK

SEQ ID NO: 35396 - protein, 477 aa, synthetic construct; identical to SEQ ID NO: 21669
  source 1..477: note = Description of Artificial Sequence: Synthetic polypeptide; note = XENP022835 empty-[CTLA-4]_H3.23_L0.129_scFv scFv-Fc Heavy Chain

SEQ ID NO: 35397 - protein, 118 aa, synthetic construct; identical to SEQ ID NO: 2632
  source 1..118: note = Description of Artificial Sequence: Synthetic polypeptide; note = VH of XENP022835

SEQ ID NO: 35398 - protein, 108 aa, synthetic construct; identical to SEQ ID NO: 2768
  source 1..108: note = Description of Artificial Sequence: Synthetic polypeptide; note = VL of XENP022835

SEQ ID NO: 35399 - protein, 231 aa, synthetic construct; identical to SEQ ID NO: 21532
  source 1..231: note = Description of Artificial Sequence: Synthetic polypeptide; note = Fc chain of XENP022835

SEQ ID NO: 35400 - protein, 5 aa, synthetic construct
  source 1..5: note = Description of Artificial Sequence: Synthetic peptide; note = XENP022835 vhCDR1
SYTMH

SEQ ID NO: 35401 - protein, 17 aa, synthetic construct
  source 1..17: note = Description of Artificial Sequence: Synthetic peptide; note = XENP022835 vhCDR2
FISYDGNYKYYADSVKG

SEQ ID NO: 35402 - protein, 9 aa, synthetic construct
  source 1..9: note = Description of Artificial Sequence: Synthetic peptide; note = XENP022835 vhCDR3
GGHLGPFDL

SEQ ID NO: 35403 - protein, 12 aa, synthetic construct
  source 1..12: note = Description of Artificial Sequence: Synthetic peptide; note = XENP022835 vlCDR1
RASQSVGSSYLA

SEQ ID NO: 35404 - protein, 7 aa, synthetic construct
  source 1..7: note = Description of Artificial Sequence: Synthetic peptide; note = XENP022835 vlCDR2
GASSRAT

SEQ ID NO: 35405 - protein, 9 aa, synthetic construct
  source 1..9: note = Description of Artificial Sequence: Synthetic peptide; note = XENP022835 vlCDR3
QQYGSSPWT

SEQ ID NO: 35406 - protein, 447 aa, synthetic construct; identical to SEQ ID NO: 23556
  source 1..447: note = Description of Artificial Sequence: Synthetic polypeptide; note = XENP023552 [CTLA-4]_H3_L0.22_Fab-empty_Fc(216)_IgG1 Fab-Fc Heavy Chain

SEQ ID NO: 35407 - protein, 118 aa, synthetic construct; identical to SEQ ID NO: 139
  source 1..118: note = Description of Artificial Sequence: Synthetic polypeptide; note = VH of XENP023552

SEQ ID NO: 35408 - protein, 5 aa, synthetic construct
  source 1..5: note = Description of Artificial Sequence: Synthetic peptide; note = XENP023552 vhCDR1
SYTMH

SEQ ID NO: 35409 - protein, 17 aa, synthetic construct
  source 1..17: note = Description of Artificial Sequence: Synthetic peptide; note = XENP023552 vhCDR2
FISYDGNNKYYADSVKG

SEQ ID NO: 35410 - protein, 9 aa, synthetic construct
  source 1..9: note = Description of Artificial Sequence: Synthetic peptide; note = XENP023552 vhCDR3
TGWLGPFDY

SEQ ID NO: 35411 - protein, 231 aa, synthetic construct; identical to SEQ ID NO: 21572
  source 1..231: note = Description of Artificial Sequence: Synthetic polypeptide; note = XENP023552 [CTLA-4]_H3_L0.22_Fab-empty_Fc(216)_IgG1 Empty-Fc Heavy Chain

SEQ ID NO: 35412 - protein, 215 aa, synthetic construct; identical to SEQ ID NO: 4504
  source 1..215: note = Description of Artificial Sequence: Synthetic polypeptide; note = XENP023552 [CTLA-4]_H3_L0.22_Fab-empty_Fc(216)_IgG1 Light Chain

SEQ ID NO: 35413 - protein, 108 aa, synthetic construct; identical to SEQ ID NO: 1607
  source 1..108: note = Description of Artificial Sequence: Synthetic polypeptide; note = VL of XENP023552

SEQ ID NO: 35414 - protein, 12 aa, synthetic construct
  source 1..12: note = Description of Artificial Sequence: Synthetic peptide; note = XENP023552 vlCDR1
RASQSVSSSYLA

SEQ ID NO: 35415 - protein, 7 aa, synthetic construct
  source 1..7: note = Description of Artificial Sequence: Synthetic peptide; note = XENP023552 vlCDR2
GAFSRAT

SEQ ID NO: 35416 - protein, 9 aa, synthetic construct
  source 1..9: note = Description of Artificial Sequence: Synthetic peptide; note = XENP023552 vlCDR3
QQYGSSPWT

SEQ ID NO: 35417 - protein, 226 aa, synthetic construct
  source 1..226: note = Description of Artificial Sequence: Synthetic polypeptide; note = XENP023041 7G8_H3.66_L1.34_Fab Heavy Chain
EVQLVESGGGLVQPGGSLRLSCAASGFTFDEAWMSWVRQAPGKGLEWVAEISTKANNHATYYAESVKGRFTISRDDSKSSVYLQMNSLRAEDTAVYYCTRLATWDWYFDVWGQGTTVTVSSASTKGPSVFPLAPSSKSTSGGTAALGCLVKDYFPEPVTVSWNSGALTSGVHTFPAVLQSSGLYSLSSVVTVPSSSLGTQTYICNVNHKPSNTKVDKKVEPKSCGS

SEQ ID NO: 35418 - protein, 121 aa, synthetic construct
  source 1..121: note = Description of Artificial Sequence: Synthetic polypeptide; note = VH of XENP023041
EVQLVESGGGLVQPGGSLRLSCAASGFTFDEAWMSWVRQAPGKGLEWVAEISTKANNHATYYAESVKGRFTISRDDSKSSVYLQMNSLRAEDTAVYYCTRLATWDWYFDVWGQGTTVTVSS

SEQ ID NO: 35419 - protein, 5 aa, synthetic construct
  source 1..5: note = Description of Artificial Sequence: Synthetic peptide; note = XENP023041 vhCDR1
EAWMS

SEQ ID NO: 35420 - protein, 19 aa, synthetic construct
  source 1..19: note = Description of Artificial Sequence: Synthetic peptide; note = XENP023041 vhCDR2
EISTKANNHATYYAESVKG

SEQ ID NO: 35421 - protein, 10 aa, synthetic construct
  source 1..10: note = Description of Artificial Sequence: Synthetic peptide; note = XENP023041 vhCDR3
LATWDWYFDV

SEQ ID NO: 35422 - protein, 218 aa, synthetic construct; identical to SEQ ID NO: 22599
  source 1..218: note = Description of Artificial Sequence: Synthetic polypeptide; note = XENP023041 7G8_H3.66_L1.34_Fab Light Chain

SEQ ID NO: 35423 - protein, 111 aa, synthetic construct; identical to SEQ ID NO: 22600
  source 1..111: note = Description of Artificial Sequence: Synthetic polypeptide; note = VL of XENP023041

SEQ ID NO: 35424 - protein, 15 aa, synthetic construct
  source 1..15: note = Description of Artificial Sequence: Synthetic peptide; note = XENP023041 vlCDR1
RASQSVDYDGDSYMN

SEQ ID NO: 35425 - protein, 7 aa, synthetic construct
  source 1..7: note = Description of Artificial Sequence: Synthetic peptide; note = XENP023041 vlCDR2
AASELES

SEQ ID NO: 35426 - protein, 9 aa, synthetic construct
  source 1..9: note = Description of Artificial Sequence: Synthetic peptide; note = XENP023041 vlCDR3
QQSNEDPFT

SEQ ID NO: 35427 - protein, 226 aa, synthetic construct
  source 1..226: note = Description of Artificial Sequence: Synthetic polypeptide; note = XENP023042 7G8_H3.67_L1.34_Fab Heavy Chain
EVQLVESGGGLVQPGGSLRLSCAASGFTFDDTWMSWVRQAPGKGLEWVAEISTKANNHATYYAESVKGRFTISRDDSKSSVYLQMNSLRAEDTAVYYCTRLATWDWYFDVWGQGTTVTVSSASTKGPSVFPLAPSSKSTSGGTAALGCLVKDYFPEPVTVSWNSGALTSGVHTFPAVLQSSGLYSLSSVVTVPSSSLGTQTYICNVNHKPSNTKVDKKVEPKSCGS

SEQ ID NO: 35428 - protein, 121 aa, synthetic construct
  source 1..121: note = Description of Artificial Sequence: Synthetic polypeptide; note = VH of XENP023042
EVQLVESGGGLVQPGGSLRLSCAASGFTFDDTWMSWVRQAPGKGLEWVAEISTKANNHATYYAESVKGRFTISRDDSKSSVYLQMNSLRAEDTAVYYCTRLATWDWYFDVWGQGTTVTVSS

SEQ ID NO: 35429 - protein, 5 aa, synthetic construct
  source 1..5: note = Description of Artificial Sequence: Synthetic peptide; note = XENP023042 vhCDR1
DTWMS

SEQ ID NO: 35430 - protein, 19 aa, synthetic construct
  source 1..19: note = Description of Artificial Sequence: Synthetic peptide; note = XENP023042 vhCDR2
EISTKANNHATYYAESVKG

SEQ ID NO: 35431 - protein, 10 aa, synthetic construct
  source 1..10: note = Description of Artificial Sequence: Synthetic peptide; note = XENP023042 vhCDR3
LATWDWYFDV

SEQ ID NO: 35432 - protein, 218 aa, synthetic construct; identical to SEQ ID NO: 22599
  source 1..218: note = Description of Artificial Sequence: Synthetic polypeptide; note = XENP023042 7G8_H3.67_L1.34_Fab Light Chain

SEQ ID NO: 35433 - protein, 111 aa, synthetic construct; identical to SEQ ID NO: 22600
  source 1..111: note = Description of Artificial Sequence: Synthetic polypeptide; note = VL of XENP023042

SEQ ID NO: 35434 - protein, 15 aa, synthetic construct
  source 1..15: note = Description of Artificial Sequence: Synthetic peptide; note = XENP023042 vlCDR1
RASQSVDYDGDSYMN

SEQ ID NO: 35435 - protein, 7 aa, synthetic construct
  source 1..7: note = Description of Artificial Sequence: Synthetic peptide; note = XENP023042 vlCDR2
AASELES

SEQ ID NO: 35436 - protein, 9 aa, synthetic construct
  source 1..9: note = Description of Artificial Sequence: Synthetic peptide; note = XENP023042 vlCDR3
QQSNEDPFT

SEQ ID NO: 35437 - protein, 226 aa, synthetic construct
  source 1..226: note = Description of Artificial Sequence: Synthetic polypeptide; note = XENP023043 7G8_H3.68_L1.34_Fab Heavy Chain
EVQLVESGGGLVQPGGSLRLSCAASGFTFDDKWMSWVRQAPGKGLEWVAEISTKANNHATYYAESVKGRFTISRDDSKSSVYLQMNSLRAEDTAVYYCTRLATWDWYFDVWGQGTTVTVSSASTKGPSVFPLAPSSKSTSGGTAALGCLVKDYFPEPVTVSWNSGALTSGVHTFPAVLQSSGLYSLSSVVTVPSSSLGTQTYICNVNHKPSNTKVDKKVEPKSCGS

SEQ ID NO: 35438 - protein, 121 aa, synthetic construct
  source 1..121: note = Description of Artificial Sequence: Synthetic polypeptide; note = VH of XENP023043
EVQLVESGGGLVQPGGSLRLSCAASGFTFDDKWMSWVRQAPGKGLEWVAEISTKANNHATYYAESVKGRFTISRDDSKSSVYLQMNSLRAEDTAVYYCTRLATWDWYFDVWGQGTTVTVSS

SEQ ID NO: 35439 - protein, 5 aa, synthetic construct
  source 1..5: note = Description of Artificial Sequence: Synthetic peptide; note = XENP023043 vhCDR1
DKWMS

SEQ ID NO: 35440 - protein, 19 aa, synthetic construct
  source 1..19: note = Description of Artificial Sequence: Synthetic peptide; note = XENP023043 vhCDR2
EISTKANNHATYYAESVKG

SEQ ID NO: 35441 - protein, 10 aa, synthetic construct
  source 1..10: note = Description of Artificial Sequence: Synthetic peptide; note = XENP023043 vhCDR3
LATWDWYFDV

SEQ ID NO: 35442 - protein, 218 aa, synthetic construct; identical to SEQ ID NO: 22599
  source 1..218: note = Description of Artificial Sequence: Synthetic polypeptide; note = XENP023043 7G8_H3.68_L1.34_Fab Light Chain

SEQ ID NO: 35443 - protein, 111 aa, synthetic construct; identical to SEQ ID NO: 22600
  source 1..111: note = Description of Artificial Sequence: Synthetic polypeptide; note = VL of XENP023043

SEQ ID NO: 35444 - protein, 15 aa, synthetic construct
  source 1..15: note = Description of Artificial Sequence: Synthetic peptide; note = XENP023043 vlCDR1
RASQSVDYDGDSYMN

SEQ ID NO: 35445 - protein, 7 aa, synthetic construct
  source 1..7: note = Description of Artificial Sequence: Synthetic peptide; note = XENP023043 vlCDR2
AASELES

SEQ ID NO: 35446 - protein, 9 aa, synthetic construct
  source 1..9: note = Description of Artificial Sequence: Synthetic peptide; note = XENP023043 vlCDR3
QQSNEDPFT

SEQ ID NO: 35447 - protein, 226 aa, synthetic construct
  source 1..226: note = Description of Artificial Sequence: Synthetic polypeptide; note = XENP023044 7G8_H3.69_L1.34_Fab Heavy Chain
EVQLVESGGGLVQPGGSLRLSCAASGFTFDDAFMSWVRQAPGKGLEWVAEISTKANNHATYYAESVKGRFTISRDDSKSSVYLQMNSLRAEDTAVYYCTRLATWDWYFDVWGQGTTVTVSSASTKGPSVFPLAPSSKSTSGGTAALGCLVKDYFPEPVTVSWNSGALTSGVHTFPAVLQSSGLYSLSSVVTVPSSSLGTQTYICNVNHKPSNTKVDKKVEPKSCGS

SEQ ID NO: 35448 - protein, 121 aa, synthetic construct
  source 1..121: note = Description of Artificial Sequence: Synthetic polypeptide; note = VH of XENP023044
EVQLVESGGGLVQPGGSLRLSCAASGFTFDDAFMSWVRQAPGKGLEWVAEISTKANNHATYYAESVKGRFTISRDDSKSSVYLQMNSLRAEDTAVYYCTRLATWDWYFDVWGQGTTVTVSS

SEQ ID NO: 35449 - protein, 5 aa, synthetic construct
  source 1..5: note = Description of Artificial Sequence: Synthetic peptide; note = XENP023044 vhCDR1
DAFMS

SEQ ID NO: 35450 - protein, 19 aa, synthetic construct
  source 1..19: note = Description of Artificial Sequence: Synthetic peptide; note = XENP023044 vhCDR2
EISTKANNHATYYAESVKG

SEQ ID NO: 35451 - protein, 10 aa, synthetic construct
  source 1..10: note = Description of Artificial Sequence: Synthetic peptide; note = XENP023044 vhCDR3
LATWDWYFDV

SEQ ID NO: 35452 - protein, 218 aa, synthetic construct; identical to SEQ ID NO: 22599
  source 1..218: note = Description of Artificial Sequence: Synthetic polypeptide; note = XENP023044 7G8_H3.69_L1.34_Fab Light Chain

SEQ ID NO: 35453 - protein, 111 aa, synthetic construct; identical to SEQ ID NO: 22600
  source 1..111: note = Description of Artificial Sequence: Synthetic polypeptide; note = VL of XENP023044

SEQ ID NO: 35454 - protein, 15 aa, synthetic construct
  source 1..15: note = Description of Artificial Sequence: Synthetic peptide; note = XENP023044 vlCDR1
RASQSVDYDGDSYMN

SEQ ID NO: 35455 - protein, 7 aa, synthetic construct
  source 1..7: note = Description of Artificial Sequence: Synthetic peptide; note = XENP023044 vlCDR2
AASELES

SEQ ID NO: 35456 - protein, 9 aa, synthetic construct
  source 1..9: note = Description of Artificial Sequence: Synthetic peptide; note = XENP023044 vlCDR3
QQSNEDPFT

SEQ ID NO: 35457 - protein, 226 aa, synthetic construct
  source 1..226: note = Description of Artificial Sequence: Synthetic polypeptide; note = XENP023045 7G8_H3.70_L1.34_Fab Heavy Chain
EVQLVESGGGLVQPGGSLRLSCAASGFTFDDAYMSWVRQAPGKGLEWVAEISTKANNHATYYAESVKGRFTISRDDSKSSVYLQMNSLRAEDTAVYYCTRLATWDWYFDVWGQGTTVTVSSASTKGPSVFPLAPSSKSTSGGTAALGCLVKDYFPEPVTVSWNSGALTSGVHTFPAVLQSSGLYSLSSVVTVPSSSLGTQTYICNVNHKPSNTKVDKKVEPKSCGS

SEQ ID NO: 35458 - protein, 121 aa, synthetic construct
  source 1..121: note = Description of Artificial Sequence: Synthetic polypeptide; note = VH of XENP023045
EVQLVESGGGLVQPGGSLRLSCAASGFTFDDAYMSWVRQAPGKGLEWVAEISTKANNHATYYAESVKGRFTISRDDSKSSVYLQMNSLRAEDTAVYYCTRLATWDWYFDVWGQGTTVTVSS

SEQ ID NO: 35459 - protein, 5 aa, synthetic construct
  source 1..5: note = Description of Artificial Sequence: Synthetic peptide; note = XENP023045 vhCDR1
DAYMS

SEQ ID NO: 35460 - protein, 19 aa, synthetic construct
  source 1..19: note = Description of Artificial Sequence: Synthetic peptide; note = XENP023045 vhCDR2
EISTKANNHATYYAESVKG

SEQ ID NO: 35461 - protein, 10 aa, synthetic construct
  source 1..10: note = Description of Artificial Sequence: Synthetic peptide; note = XENP023045 vhCDR3
LATWDWYFDV

SEQ ID NO: 35462 - protein, 218 aa, synthetic construct; identical to SEQ ID NO: 22599
  source 1..218: note = Description of Artificial Sequence: Synthetic polypeptide; note = XENP023045 7G8_H3.70_L1.34_Fab Light Chain

SEQ ID NO: 35463 - protein, 111 aa, synthetic construct; identical to SEQ ID NO: 22600
  source 1..111: note = Description of Artificial Sequence: Synthetic polypeptide; note = VL of XENP023045

SEQ ID NO: 35464 - protein, 15 aa, synthetic construct
  source 1..15: note = Description of Artificial Sequence: Synthetic peptide; note = XENP023045 vlCDR1
RASQSVDYDGDSYMN

SEQ ID NO: 35465 - protein, 7 aa, synthetic construct
  source 1..7: note = Description of Artificial Sequence: Synthetic peptide; note = XENP023045 vlCDR2
AASELES

SEQ ID NO: 35466 - protein, 9 aa, synthetic construct
  source 1..9: note = Description of Artificial Sequence: Synthetic peptide; note = XENP023045 vlCDR3
QQSNEDPFT

SEQ ID NO: 35467 - protein, 226 aa, synthetic construct
  source 1..226: note = Description of Artificial Sequence: Synthetic polypeptide; note = XENP023046 7G8_H3.71_L1.34_Fab Heavy Chain
EVQLVESGGGLVQPGGSLRLSCAASGFTFDDAWMSWVRQAPGKGLEWVAEISTKAYNHATYYAESVKGRFTISRDDSKSSVYLQMNSLRAEDTAVYYCTRLATWDWYFDVWGQGTTVTVSSASTKGPSVFPLAPSSKSTSGGTAALGCLVKDYFPEPVTVSWNSGALTSGVHTFPAVLQSSGLYSLSSVVTVPSSSLGTQTYICNVNHKPSNTKVDKKVEPKSCGS

SEQ ID NO: 35468 - protein, 121 aa, synthetic construct
  source 1..121: note = Description of Artificial Sequence: Synthetic polypeptide; note = VH of XENP023046
EVQLVESGGGLVQPGGSLRLSCAASGFTFDDAWMSWVRQAPGKGLEWVAEISTKAYNHATYYAESVKGRFTISRDDSKSSVYLQMNSLRAEDTAVYYCTRLATWDWYFDVWGQGTTVTVSS

SEQ ID NO: 35469 - protein, 5 aa, synthetic construct
  source 1..5: note = Description of Artificial Sequence: Synthetic peptide; note = XENP023046 vhCDR1
DAWMS

SEQ ID NO: 35470 - protein, 19 aa, synthetic construct
  source 1..19: note = Description of Artificial Sequence: Synthetic peptide; note = XENP023046 vhCDR2
EISTKAYNHATYYAESVKG

SEQ ID NO: 35471 - protein, 10 aa, synthetic construct
  source 1..10: note = Description of Artificial Sequence: Synthetic peptide; note = XENP023046 vhCDR3
LATWDWYFDV

SEQ ID NO: 35472 - protein, 218 aa, synthetic construct; identical to SEQ ID NO: 22599
  source 1..218: note = Description of Artificial Sequence: Synthetic polypeptide; note = XENP023046 7G8_H3.71_L1.34_Fab Light Chain

SEQ ID NO: 35473 - protein, 111 aa, synthetic construct; identical to SEQ ID NO: 22600
  source 1..111: note = Description of Artificial Sequence: Synthetic polypeptide; note = VL of XENP023046

SEQ ID NO: 35474 - protein, 15 aa, synthetic construct
  source 1..15: note = Description of Artificial Sequence: Synthetic peptide; note = XENP023046 vlCDR1
RASQSVDYDGDSYMN

SEQ ID NO: 35475 - protein, 7 aa, synthetic construct
  source 1..7: note = Description of Artificial Sequence: Synthetic peptide; note = XENP023046 vlCDR2
AASELES

SEQ ID NO: 35476 - protein, 9 aa, synthetic construct
  source 1..9: note = Description of Artificial Sequence: Synthetic peptide; note = XENP023046 vlCDR3
QQSNEDPFT

SEQ ID NO: 35477 - protein, 226 aa, synthetic construct
  source 1..226: note = Description of Artificial Sequence: Synthetic polypeptide; note = XENP023047 7G8_H3.72_L1.34_Fab Heavy Chain
EVQLVESGGGLVQPGGSLRLSCAASGFTFDDAWMSWVRQAPGKGLEWVAEISTKANNHATYYAESVKGRFTISRDDSKSSVYLQMNSLRAEDTAVYYCTRLATFDWYFDVWGQGTTVTVSSASTKGPSVFPLAPSSKSTSGGTAALGCLVKDYFPEPVTVSWNSGALTSGVHTFPAVLQSSGLYSLSSVVTVPSSSLGTQTYICNVNHKPSNTKVDKKVEPKSCGS

SEQ ID NO: 35478 - protein, 121 aa, synthetic construct
  source 1..121: note = Description of Artificial Sequence: Synthetic polypeptide; note = VH of XENP023047
EVQLVESGGGLVQPGGSLRLSCAASGFTFDDAWMSWVRQAPGKGLEWVAEISTKANNHATYYAESVKGRFTISRDDSKSSVYLQMNSLRAEDTAVYYCTRLATFDWYFDVWGQGTTVTVSS

SEQ ID NO: 35479 - protein, 5 aa, synthetic construct
  source 1..5: note = Description of Artificial Sequence: Synthetic peptide; note = XENP023047 vhCDR1
DAWMS

SEQ ID NO: 35480 - protein, 19 aa, synthetic construct
  source 1..19: note = Description of Artificial Sequence: Synthetic peptide; note = XENP023047 vhCDR2
EISTKANNHATYYAESVKG

SEQ ID NO: 35481 - protein, 10 aa, synthetic construct
  source 1..10: note = Description of Artificial Sequence: Synthetic peptide; note = XENP023047 vhCDR3
LATFDWYFDV

SEQ ID NO: 35482 - protein, 218 aa, synthetic construct; identical to SEQ ID NO: 22599
  source 1..218: note = Description of Artificial Sequence: Synthetic polypeptide; note = XENP023047 7G8_H3.72_L1.34_Fab Light Chain

SEQ ID NO: 35483 - protein, 111 aa, synthetic construct; identical to SEQ ID NO: 22600
  source 1..111: note = Description of Artificial Sequence: Synthetic polypeptide; note = VL of XENP023047

SEQ ID NO: 35484 - protein, 15 aa, synthetic construct
  source 1..15: note = Description of Artificial Sequence: Synthetic peptide; note = XENP023047 vlCDR1
RASQSVDYDGDSYMN

SEQ ID NO: 35485 - protein, 7 aa, synthetic construct
  source 1..7: note = Description of Artificial Sequence: Synthetic peptide; note = XENP023047 vlCDR2
AASELES

SEQ ID NO: 35486 - protein, 9 aa, synthetic construct
  source 1..9: note = Description of Artificial Sequence: Synthetic peptide; note = XENP023047 vlCDR3
QQSNEDPFT

SEQ ID NO: 35487 - protein, 226 aa, synthetic construct
  source 1..226: note = Description of Artificial Sequence: Synthetic polypeptide; note = XENP023048 7G8_H3.73_L1.34_Fab Heavy Chain
EVQLVESGGGLVQPGGSLRLSCAASGFTFDDAWMSWVRQAPGKGLEWVAEISTKANNHATYYAESVKGRFTISRDDSKSSVYLQMNSLRAEDTAVYYCTRLATYDWYFDVWGQGTTVTVSSASTKGPSVFPLAPSSKSTSGGTAALGCLVKDYFPEPVTVSWNSGALTSGVHTFPAVLQSSGLYSLSSVVTVPSSSLGTQTYICNVNHKPSNTKVDKKVEPKSCGS

SEQ ID NO: 35488 - protein, 121 aa, synthetic construct
  source 1..121: note = Description of Artificial Sequence: Synthetic polypeptide; note = VH of XENP023048
EVQLVESGGGLVQPGGSLRLSCAASGFTFDDAWMSWVRQAPGKGLEWVAEISTKANNHATYYAESVKGRFTISRDDSKSSVYLQMNSLRAEDTAVYYCTRLATYDWYFDVWGQGTTVTVSS

SEQ ID NO: 35489 - protein, 5 aa, synthetic construct
  source 1..5: note = Description of Artificial Sequence: Synthetic peptide; note = XENP023048 vhCDR1
DAWMS

SEQ ID NO: 35490 - protein, 19 aa, synthetic construct
  source 1..19: note = Description of Artificial Sequence: Synthetic peptide; note = XENP023048 vhCDR2
EISTKANNHATYYAESVKG

SEQ ID NO: 35491 - protein, 10 aa, synthetic construct
  source 1..10: note = Description of Artificial Sequence: Synthetic peptide; note = XENP023048 vhCDR3
LATYDWYFDV

SEQ ID NO: 35492 - protein, 218 aa, synthetic construct; identical to SEQ ID NO: 22599
  source 1..218: note = Description of Artificial Sequence: Synthetic polypeptide; note = XENP023048 7G8_H3.73_L1.34_Fab Light Chain

SEQ ID NO: 35493 - protein, 111 aa, synthetic construct; identical to SEQ ID NO: 22600
  source 1..111: note = Description of Artificial Sequence: Synthetic polypeptide; note = VL of XENP023048

SEQ ID NO: 35494 - protein, 15 aa, synthetic construct
  source 1..15: note = Description of Artificial Sequence: Synthetic peptide; note = XENP023048 vlCDR1
RASQSVDYDGDSYMN

SEQ ID NO: 35495 - protein, 7 aa, synthetic construct
  source 1..7: note = Description of Artificial Sequence: Synthetic peptide; note = XENP023048 vlCDR2
AASELES

SEQ ID NO: 35496 - protein, 9 aa, synthetic construct
  source 1..9: note = Description of Artificial Sequence: Synthetic peptide; note = XENP023048 vlCDR3
QQSNEDPFT

SEQ ID NO: 35497 - protein, 226 aa, synthetic construct
  source 1..226: note = Description of Artificial Sequence: Synthetic polypeptide; note = XENP023049 7G8_H3.74_L1.34_Fab Heavy Chain
EVQLVESGGGLVQPGGSLRLSCAASGFTFDDAWMSWVRQAPGKGLEWVAEISTKANNHATYYAESVKGRFTISRDDSKSSVYLQMNSLRAEDTAVYYCTRLATWDFYFDVWGQGTTVTVSSASTKGPSVFPLAPSSKSTSGGTAALGCLVKDYFPEPVTVSWNSGALTSGVHTFPAVLQSSGLYSLSSVVTVPSSSLGTQTYICNVNHKPSNTKVDKKVEPKSCGS

SEQ ID NO: 35498 - protein, 121 aa, synthetic construct
  source 1..121: note = Description of Artificial Sequence: Synthetic polypeptide; note = VH of XENP023049
EVQLVESGGGLVQPGGSLRLSCAASGFTFDDAWMSWVRQAPGKGLEWVAEISTKANNHATYYAESVKGRFTISRDDSKSSVYLQMNSLRAEDTAVYYCTRLATWDFYFDVWGQGTTVTVSS

SEQ ID NO: 35499 - protein, 5 aa, synthetic construct
  source 1..5: note = Description of Artificial Sequence: Synthetic peptide; note = XENP023049 vhCDR1
DAWMS

SEQ ID NO: 35500 - protein, 19 aa, synthetic construct
  source 1..19: note = Description of Artificial Sequence: Synthetic peptide; note = XENP023049 vhCDR2
EISTKANNHATYYAESVKG

SEQ ID NO: 35501 - protein, 10 aa, synthetic construct
  source 1..10: note = Description of Artificial Sequence: Synthetic peptide; note = XENP023049 vhCDR3
LATWDFYFDV

SEQ ID NO: 35502 - protein, 218 aa, synthetic construct; identical to SEQ ID NO: 22599
  source 1..218: note = Description of Artificial Sequence: Synthetic polypeptide; note = XENP023049 7G8_H3.74_L1.34_Fab Light Chain

SEQ ID NO: 35503 - protein, 111 aa, synthetic construct; identical to SEQ ID NO: 22600
  source 1..111: note = Description of Artificial Sequence: Synthetic polypeptide; note = VL of XENP023049

SEQ ID NO: 35504 - protein, 15 aa, synthetic construct
  source 1..15: note = Description of Artificial Sequence: Synthetic peptide; note = XENP023049 vlCDR1
RASQSVDYDGDSYMN

SEQ ID NO: 35505 - protein, 7 aa, synthetic construct
  source 1..7: note = Description of Artificial Sequence: Synthetic peptide; note = XENP023049 vlCDR2
AASELES

SEQ ID NO: 35506 - protein, 9 aa, synthetic construct
  source 1..9: note = Description of Artificial Sequence: Synthetic peptide; note = XENP023049 vlCDR3
QQSNEDPFT

SEQ ID NO: 35507 - protein, 226 aa, synthetic construct
  source 1..226: note = Description of Artificial Sequence: Synthetic polypeptide; note = XENP023050 7G8_H3.75_L1.34_Fab Heavy Chain
EVQLVESGGGLVQPGGSLRLSCAASGFTFDDAWMSWVRQAPGKGLEWVAEISTKANNHATYYAESVKGRFTISRDDSKSSVYLQMNSLRAEDTAVYYCTRLATWDYYFDVWGQGTTVTVSSASTKGPSVFPLAPSSKSTSGGTAALGCLVKDYFPEPVTVSWNSGALTSGVHTFPAVLQSSGLYSLSSVVTVPSSSLGTQTYICNVNHKPSNTKVDKKVEPKSCGS

SEQ ID NO: 35508 - protein, 121 aa, synthetic construct
  source 1..121: note = Description of Artificial Sequence: Synthetic polypeptide; note = VH of XENP023050
EVQLVESGGGLVQPGGSLRLSCAASGFTFDDAWMSWVRQAPGKGLEWVAEISTKANNHATYYAESVKGRFTISRDDSKSSVYLQMNSLRAEDTAVYYCTRLATWDYYFDVWGQGTTVTVSS

SEQ ID NO: 35509 - protein, 5 aa, synthetic construct
  source 1..5: note = Description of Artificial Sequence: Synthetic peptide; note = XENP023050 vhCDR1
DAWMS

SEQ ID NO: 35510 - protein, 19 aa, synthetic construct
  source 1..19: note = Description of Artificial Sequence: Synthetic peptide; note = XENP023050 vhCDR2
EISTKANNHATYYAESVKG

SEQ ID NO: 35511 - protein, 10 aa, synthetic construct
  source 1..10: note = Description of Artificial Sequence: Synthetic peptide; note = XENP023050 vhCDR3
LATWDYYFDV

SEQ ID NO: 35512 - protein, 218 aa, synthetic construct; identical to SEQ ID NO: 22599
  source 1..218: note = Description of Artificial Sequence: Synthetic polypeptide; note = XENP023050 7G8_H3.75_L1.34_Fab Light Chain

SEQ ID NO: 35513 - protein, 111 aa, synthetic construct; identical to SEQ ID NO: 22600
  source 1..111: note = Description of Artificial Sequence: Synthetic polypeptide; note = VL of XENP023050

SEQ ID NO: 35514 - protein, 15 aa, synthetic construct
  source 1..15: note = Description of Artificial Sequence: Synthetic peptide; note = XENP023050 vlCDR1
RASQSVDYDGDSYMN

SEQ ID NO: 35515 - protein, 7 aa, synthetic construct
  source 1..7: note = Description of Artificial Sequence: Synthetic peptide; note = XENP023050 vlCDR2
AASELES

SEQ ID NO: 35516 - protein, 9 aa, synthetic construct
  source 1..9: note = Description of Artificial Sequence: Synthetic peptide; note = XENP023050 vlCDR3
QQSNEDPFT

SEQ ID NO: 35517 - protein, 226 aa, synthetic construct; identical to SEQ ID NO: 32254
  source 1..226: note = Description of Artificial Sequence: Synthetic polypeptide; note = XENP023051 7G8_H3.30_L1.38_Fab Heavy Chain

SEQ ID NO: 35518 - protein, 121 aa, synthetic construct; identical to SEQ ID NO: 22485
  source 1..121: note = Description of Artificial Sequence: Synthetic polypeptide; note = VH of XENP023051

SEQ ID NO: 35519 - protein, 5 aa, synthetic construct
  source 1..5: note = Description of Artificial Sequence: Synthetic peptide; note = XENP023051 vhCDR1
DAWMS

SEQ ID NO: 35520 - protein, 19 aa, synthetic construct
  source 1..19: note = Description of Artificial Sequence: Synthetic peptide; note = XENP023051 vhCDR2
EISTKANNHATYYAESVKG

SEQ ID NO: 35521 - protein, 10 aa, synthetic construct
  source 1..10: note = Description of Artificial Sequence: Synthetic peptide; note = XENP023051 vhCDR3
LATWDWYFDV

SEQ ID NO: 35522 - protein, 218 aa, synthetic construct
  source 1..218: note = Description of Artificial Sequence: Synthetic polypeptide; note = XENP023051 7G8_H3.30_L1.38_Fab Light Chain
DIVLTQSPSSLSASVGDRVTITCRASQSVDYEGDSYMNWYQQKPGKPPKLLIYAASELESGIPARFSGSGSGTDFTLTISSLQPEDFATYYCQQSNEDPFTFGSGTKLEIKRTVAAPSVFIFPPSDEQLKSGTASVVCLLNNFYPREAKVQWKVDNALQSGNSQESVTEQDSKDSTYSLSSTLTLSKADYEKHKVYACEVTHQGLSSPVTKSFNRGEC

SEQ ID NO: 35523 - protein, 111 aa, synthetic construct
  source 1..111: note = Description of Artificial Sequence: Synthetic polypeptide; note = VL of XENP023051
DIVLTQSPSSLSASVGDRVTITCRASQSVDYEGDSYMNWYQQKPGKPPKLLIYAASELESGIPARFSGSGSGTDFTLTISSLQPEDFATYYCQQSNEDPFTFGSGTKLEIK

SEQ ID NO: 35524 - protein, 15 aa, synthetic construct
  source 1..15: note = Description of Artificial Sequence: Synthetic peptide; note = XENP023051 vlCDR1
RASQSVDYEGDSYMN

SEQ ID NO: 35525 - protein, 7 aa, synthetic construct
  source 1..7: note = Description of Artificial Sequence: Synthetic peptide; note = XENP023051 vlCDR2
AASELES

SEQ ID NO: 35526 - protein, 9 aa, synthetic construct
  source 1..9: note = Description of Artificial Sequence: Synthetic peptide; note = XENP023051 vlCDR3
QQSNEDPFT

SEQ ID NO: 35527 - protein, 226 aa, synthetic construct; identical to SEQ ID NO: 32254
  source 1..226: note = Description of Artificial Sequence: Synthetic polypeptide; note = XENP023052 7G8_H3.30_L1.39_Fab Heavy Chain

SEQ ID NO: 35528 - protein, 121 aa, synthetic construct; identical to SEQ ID NO: 22485
  source 1..121: note = Description of Artificial Sequence: Synthetic polypeptide; note = VH of XENP023052

SEQ ID NO: 35529 - protein, 5 aa, synthetic construct
  source 1..5: note = Description of Artificial Sequence: Synthetic peptide; note = XENP023052 vhCDR1
DAWMS

SEQ ID NO: 35530 - protein, 19 aa, synthetic construct
  source 1..19: note = Description of Artificial Sequence: Synthetic peptide; note = XENP023052 vhCDR2
EISTKANNHATYYAESVKG

SEQ ID NO: 35531 - protein, 10 aa, synthetic construct
  source 1..10: note = Description of Artificial Sequence: Synthetic peptide; note = XENP023052 vhCDR3
LATWDWYFDV

SEQ ID NO: 35532 - protein, 218 aa, synthetic construct
  source 1..218: note = Description of Artificial Sequence: Synthetic polypeptide; note = XENP023052 7G8_H3.30_L1.39_Fab Light Chain
DIVLTQSPSSLSASVGDRVTITCRASQSVDYYGDSYMNWYQQKPGKPPKLLIYAASELESGIPARFSGSGSGTDFTLTISSLQPEDFATYYCQQSNEDPFTFGSGTKLEIKRTVAAPSVFIFPPSDEQLKSGTASVVCLLNNFYPREAKVQWKVDNALQSGNSQESVTEQDSKDSTYSLSSTLTLSKADYEKHKVYACEVTHQGLSSPVTKSFNRGEC

SEQ ID NO: 35533 - protein, 111 aa, synthetic construct
  source 1..111: note = Description of Artificial Sequence: Synthetic polypeptide; note = VL of XENP023052
DIVLTQSPSSLSASVGDRVTITCRASQSVDYYGDSYMNWYQQKPGKPPKLLIYAASELESGIPARFSGSGSGTDFTLTISSLQPEDFATYYCQQSNEDPFTFGSGTKLEIK

SEQ ID NO: 35534 - protein, 15 aa, synthetic construct
  source 1..15: note = Description of Artificial Sequence: Synthetic peptide; note = XENP023052 vlCDR1
RASQSVDYYGDSYMN

SEQ ID NO: 35535 - protein, 7 aa, synthetic construct
  source 1..7: note = Description of Artificial Sequence: Synthetic peptide; note = XENP023052 vlCDR2
AASELES

SEQ ID NO: 35536 - protein, 9 aa, synthetic construct
  source 1..9: note = Description of Artificial Sequence: Synthetic peptide; note = XENP023052 vlCDR3
QQSNEDPFT

SEQ ID NO: 35537 - protein, 226 aa, synthetic construct; identical to SEQ ID NO: 32254
  source 1..226: note = Description of Artificial Sequence: Synthetic polypeptide; note = XENP023053 7G8_H3.30_L1.40_Fab Heavy Chain

SEQ ID NO: 35538 - protein, 121 aa, synthetic construct; identical to SEQ ID NO: 22485
  source 1..121: note = Description of Artificial Sequence: Synthetic polypeptide; note = VH of XENP023053

SEQ ID NO: 35539 - protein, 5 aa, synthetic construct
  source 1..5: note = Description of Artificial Sequence: Synthetic peptide; note = XENP023053 vhCDR1
DAWMS

SEQ ID NO: 35540 - protein, 19 aa, synthetic construct
  source 1..19: note = Description of Artificial Sequence: Synthetic peptide; note = XENP023053 vhCDR2
EISTKANNHATYYAESVKG

SEQ ID NO: 35541 - protein, 10 aa, synthetic construct
  source 1..10: note = Description of Artificial Sequence: Synthetic peptide; note = XENP023053 vhCDR3
LATWDWYFDV

SEQ ID NO: 35542 - protein, 218 aa, synthetic construct
  source 1..218: note = Description of Artificial Sequence: Synthetic polypeptide; note = XENP023053 7G8_H3.30_L1.40_Fab Light Chain
DIVLTQSPSSLSASVGDRVTITCRASQSVDYDADSYMNWYQQKPGKPPKLLIYAASELESGIPARFSGSGSGTDFTLTISSLQPEDFATYYCQQSNEDPFTFGSGTKLEIKRTVAAPSVFIFPPSDEQLKSGTASVVCLLNNFYPREAKVQWKVDNALQSGNSQESVTEQDSKDSTYSLSSTLTLSKADYEKHKVYACEVTHQGLSSPVTKSFNRGEC

SEQ ID NO: 35543 - protein, 111 aa, synthetic construct
  source 1..111: note = Description of Artificial Sequence: Synthetic polypeptide; note = VL of XENP023053
DIVLTQSPSSLSASVGDRVTITCRASQSVDYDADSYMNWYQQKPGKPPKLLIYAASELESGIPARFSGSGSGTDFTLTISSLQPEDFATYYCQQSNEDPFTFGSGTKLEIK

SEQ ID NO: 35544 - protein, 15 aa, synthetic construct
  source 1..15: note = Description of Artificial Sequence: Synthetic peptide; note = XENP023053 vlCDR1
RASQSVDYDADSYMN

SEQ ID NO: 35545 - protein, 7 aa, synthetic construct
  source 1..7: note = Description of Artificial Sequence: Synthetic peptide; note = XENP023053 vlCDR2
AASELES

SEQ ID NO: 35546 - protein, 9 aa, synthetic construct
  source 1..9: note = Description of Artificial Sequence: Synthetic peptide; note = XENP023053 vlCDR3
QQSNEDPFT

SEQ ID NO: 35547 - protein, 226 aa, synthetic construct; identical to SEQ ID NO: 32254
  source 1..226: note = Description of Artificial Sequence: Synthetic polypeptide; note = XENP023054 7G8_H3.30_L1.41_Fab Heavy Chain

SEQ ID NO: 35548 - protein, 121 aa, synthetic construct; identical to SEQ ID NO: 22485
  source 1..121: note = Description of Artificial Sequence: Synthetic polypeptide; note = VH of XENP023054

SEQ ID NO: 35549 - protein, 5 aa, synthetic construct
  source 1..5: note = Description of Artificial Sequence: Synthetic peptide; note = XENP023054 vhCDR1
DAWMS

SEQ ID NO: 35550 - protein, 19 aa, synthetic construct
  source 1..19: note = Description of Artificial Sequence: Synthetic peptide; note = XENP023054 vhCDR2
EISTKANNHATYYAESVKG

SEQ ID NO: 35551 - protein, 10 aa, synthetic construct
  source 1..10: note = Description of Artificial Sequence: Synthetic peptide; note = XENP023054 vhCDR3
LATWDWYFDV

SEQ ID NO: 35552 - protein, 218 aa, synthetic construct
  source 1..218: note = Description of Artificial Sequence: Synthetic polypeptide; note = XENP023054 7G8_H3.30_L1.41_Fab Light Chain
DIVLTQSPSSLSASVGDRVTITCRASQSVDYDQDSYMNWYQQKPGKPPKLLIYAASELESGIPARFSGSGSGTDFTLTISSLQPEDFATYYCQQSNEDPFTFGSGTKLEIKRTVAAPSVFIFPPSDEQLKSGTASVVCLLNNFYPREAKVQWKVDNALQSGNSQESVTEQDSKDSTYSLSSTLTLSKADYEKHKVYACEVTHQGLSSPVTKSFNRGEC

SEQ ID NO: 35553 - protein, 111 aa, synthetic construct
  source 1..111: note = Description of Artificial Sequence: Synthetic polypeptide; note = VL of XENP023054
DIVLTQSPSSLSASVGDRVTITCRASQSVDYDQDSYMNWYQQKPGKPPKLLIYAASELESGIPARFSGSGSGTDFTLTISSLQPEDFATYYCQQSNEDPFTFGSGTKLEIK

SEQ ID NO: 35554 - protein, 15 aa, synthetic construct
  source 1..15: note = Description of Artificial Sequence: Synthetic peptide; note = XENP023054 vlCDR1
RASQSVDYDQDSYMN

SEQ ID NO: 35555 - protein, 7 aa, synthetic construct
  source 1..7: note = Description of Artificial Sequence: Synthetic peptide; note = XENP023054 vlCDR2
AASELES

SEQ ID NO: 35556 - protein, 9 aa, synthetic construct
  source 1..9: note = Description of Artificial Sequence: Synthetic peptide; note = XENP023054 vlCDR3
QQSNEDPFT

SEQ ID NO: 35557 - protein, 226 aa, synthetic construct; identical to SEQ ID NO: 32254
  source 1..226: note = Description of Artificial Sequence: Synthetic polypeptide; note = XENP023055 7G8_H3.30_L1.42_Fab Heavy Chain

SEQ ID NO: 35558 - protein, 121 aa, synthetic construct; identical to SEQ ID NO: 22485
  source 1..121: note = Description of Artificial Sequence: Synthetic polypeptide; note = VH of XENP023055

SEQ ID NO: 35559 - protein, 5 aa, synthetic construct
  source 1..5: note = Description of Artificial Sequence: Synthetic peptide; note = XENP023055 vhCDR1
DAWMS

SEQ ID NO: 35560 - protein, 19 aa, synthetic construct
  source 1..19: note = Description of Artificial Sequence: Synthetic peptide; note = XENP023055 vhCDR2
EISTKANNHATYYAESVKG

SEQ ID NO: 35561 - protein, 10 aa, synthetic construct
  source 1..10: note = Description of Artificial Sequence: Synthetic peptide; note = XENP023055 vhCDR3
LATWDWYFDV

SEQ ID NO: 35562 - protein, 218 aa, synthetic construct
  source 1..218: note = Description of Artificial Sequence: Synthetic polypeptide; note = XENP023055 7G8_H3.30_L1.42_Fab Light Chain
DIVLTQSPSSLSASVGDRVTITCRASQSVDYDDDSYMNWYQQKPGKPPKLLIYAASELESGIPARFSGSGSGTDFTLTISSLQPEDFATYYCQQSNEDPFTFGSGTKLEIKRTVAAPSVFIFPPSDEQLKSGTASVVCLLNNFYPREAKVQWKVDNALQSGNSQESVTEQDSKDSTYSLSSTLTLSKADYEKHKVYACEVTHQGLSSPVTKSFNRGEC

SEQ ID NO: 35563 - protein, 111 aa, synthetic construct
  source 1..111: note = Description of Artificial Sequence: Synthetic polypeptide; note = VL of XENP023055
DIVLTQSPSSLSASVGDRVTITCRASQSVDYDDDSYMNWYQQKPGKPPKLLIYAASELESGIPARFSGSGSGTDFTLTISSLQPEDFATYYCQQSNEDPFTFGSGTKLEIK

SEQ ID NO: 35564 - protein, 15 aa, synthetic construct
  source 1..15: note = Description of Artificial Sequence: Synthetic peptide; note = XENP023055 vlCDR1
RASQSVDYDDDSYMN

SEQ ID NO: 35565 - protein, 7 aa, synthetic construct
  source 1..7: note = Description of Artificial Sequence: Synthetic peptide; note = XENP023055 vlCDR2
AASELES

SEQ ID NO: 35566 - protein, 9 aa, synthetic construct
  source 1..9: note = Description of Artificial Sequence: Synthetic peptide; note = XENP023055 vlCDR3
QQSNEDPFT

SEQ ID NO: 35567 - protein, 226 aa, synthetic construct; identical to SEQ ID NO: 32254
  source 1..226: note = Description of Artificial Sequence: Synthetic polypeptide; note = XENP023056 7G8_H3.30_L1.43_Fab Heavy Chain

SEQ ID NO: 35568 - protein, 121 aa, synthetic construct; identical to SEQ ID NO: 22485
  source 1..121: note = Description of Artificial Sequence: Synthetic polypeptide; note = VH of XENP023056

SEQ ID NO: 35569 - protein, 5 aa, synthetic construct
  source 1..5: note = Description of Artificial Sequence: Synthetic peptide; note = XENP023056 vhCDR1
DAWMS

SEQ ID NO: 35570 - protein, 19 aa, synthetic construct
  source 1..19: note = Description of Artificial Sequence: Synthetic peptide; note = XENP023056 vhCDR2
EISTKANNHATYYAESVKG

SEQ ID NO: 35571 - protein, 10 aa, synthetic construct
  source 1..10: note = Description of Artificial Sequence: Synthetic peptide; note = XENP023056 vhCDR3
LATWDWYFDV

SEQ ID NO: 35572 - protein, 218 aa, synthetic construct
  source 1..218: note = Description of Artificial Sequence: Synthetic polypeptide; note = XENP023056 7G8_H3.30_L1.43_Fab Light Chain
DIVLTQSPSSLSASVGDRVTITCRASQSVDYDYDSYMNWYQQKPGKPPKLLIYAASELESGIPARFSGSGSGTDFTLTISSLQPEDFATYYCQQSNEDPFTFGSGTKLEIKRTVAAPSVFIFPPSDEQLKSGTASVVCLLNNFYPREAKVQWKVDNALQSGNSQESVTEQDSKDSTYSLSSTLTLSKADYEKHKVYACEVTHQGLSSPVTKSFNRGEC

SEQ ID NO: 35573 - protein, 111 aa, synthetic construct
  source 1..111: note = Description of Artificial Sequence: Synthetic polypeptide; note = VL of XENP023056
DIVLTQSPSSLSASVGDRVTITCRASQSVDYDYDSYMNWYQQKPGKPPKLLIYAASELESGIPARFSGSGSGTDFTLTISSLQPEDFATYYCQQSNEDPFTFGSGTKLEIK

SEQ ID NO: 35574 - protein, 15 aa, synthetic construct
  source 1..15: note = Description of Artificial Sequence: Synthetic peptide; note = XENP023056 vlCDR1
RASQSVDYDYDSYMN

SEQ ID NO: 35575 - protein, 7 aa, synthetic construct
  source 1..7: note = Description of Artificial Sequence: Synthetic peptide; note = XENP023056 vlCDR2
AASELES

SEQ ID NO: 35576 - protein, 9 aa, synthetic construct
  source 1..9: note = Description of Artificial Sequence: Synthetic peptide; note = XENP023056 vlCDR3
QQSNEDPFT

SEQ ID NO: 35577 - protein, 226 aa, synthetic construct; identical to SEQ ID NO: 35417
  source 1..226: note = Description of Artificial Sequence: Synthetic polypeptide; note = XENP023220 7G8_H3.66_L1.39_Fab Heavy Chain

SEQ ID NO: 35578 - protein, 121 aa, synthetic construct; identical to SEQ ID NO: 35418
  source 1..121: note = Description of Artificial Sequence: Synthetic polypeptide; note = VH of XENP023220

SEQ ID NO: 35579 - protein, 5 aa, synthetic construct
  source 1..5: note = Description of Artificial Sequence: Synthetic peptide; note = XENP023220 vhCDR1
EAWMS

SEQ ID NO: 35580 - protein, 19 aa, synthetic construct
  source 1..19: note = Description of Artificial Sequence: Synthetic peptide; note = XENP023220 vhCDR2
EISTKANNHATYYAESVKG

SEQ ID NO: 35581 - protein, 10 aa, synthetic construct
  source 1..10: note = Description of Artificial Sequence: Synthetic peptide; note = XENP023220 vhCDR3
LATWDWYFDV

SEQ ID NO: 35582 - protein, 218 aa, synthetic construct; identical to SEQ ID NO: 35532
  source 1..218: note = Description of Artificial Sequence: Synthetic polypeptide; note = XENP023220 7G8_H3.66_L1.39_Fab Light Chain

SEQ ID NO: 35583 - protein, 111 aa, synthetic construct; identical to SEQ ID NO: 35533
  source 1..111: note = Description of Artificial Sequence: Synthetic polypeptide; note = VL of XENP023220

SEQ ID NO: 35584 - protein, 15 aa, synthetic construct
  source 1..15: note = Description of Artificial Sequence: Synthetic peptide; note = XENP023220 vlCDR1
RASQSVDYYGDSYMN

SEQ ID NO: 35585 - protein, 7 aa, synthetic construct
  source 1..7: note = Description of Artificial Sequence: Synthetic peptide; note = XENP023220 vlCDR2
AASELES

SEQ ID NO: 35586 - protein, 9 aa, synthetic construct
  source 1..9: note = Description of Artificial Sequence: Synthetic peptide; note = XENP023220 vlCDR3
QQSNEDPFT

SEQ ID NO: 35587 - protein, 226 aa, synthetic construct; identical to SEQ ID NO: 35427
  source 1..226: note = Description of Artificial Sequence: Synthetic polypeptide; note = XENP023221 7G8_H3.67_L1.39_Fab Heavy Chain

SEQ ID NO: 35588 - protein, 121 aa, synthetic construct; identical to SEQ ID NO: 35428
  source 1..121: note = Description of Artificial Sequence: Synthetic polypeptide; note = VH of XENP023221

SEQ ID NO: 35589 - protein, 5 aa, synthetic construct
  source 1..5: note = Description of Artificial Sequence: Synthetic peptide; note = XENP023221 vhCDR1
DTWMS

SEQ ID NO: 35590 - protein, 19 aa, synthetic construct
  source 1..19: note = Description of Artificial Sequence: Synthetic peptide; note = XENP023221 vhCDR2
EISTKANNHATYYAESVKG

SEQ ID NO: 35591 - protein, 10 aa, synthetic construct
  source 1..10: note = Description of Artificial Sequence: Synthetic peptide; note = XENP023221 vhCDR3
LATWDWYFDV

SEQ ID NO: 35592 - protein, 218 aa, synthetic construct; identical to SEQ ID NO: 35532
  source 1..218: note = Description of Artificial Sequence: Synthetic polypeptide; note = XENP023221 7G8_H3.67_L1.39_Fab Light Chain

SEQ ID NO: 35593 - protein, 111 aa, synthetic construct; identical to SEQ ID NO: 35533
  source 1..111: note = Description of Artificial Sequence: Synthetic polypeptide; note = VL of XENP023221

SEQ ID NO: 35594 - protein, 15 aa, synthetic construct
  source 1..15: note = Description of Artificial Sequence: Synthetic peptide; note = XENP023221 vlCDR1
RASQSVDYYGDSYMN

SEQ ID NO: 35595 - protein, 7 aa, synthetic construct
  source 1..7: note = Description of Artificial Sequence: Synthetic peptide; note = XENP023221 vlCDR2
AASELES

SEQ ID NO: 35596 - protein, 9 aa, synthetic construct
  source 1..9: note = Description of Artificial Sequence: Synthetic peptide; note = XENP023221 vlCDR3
QQSNEDPFT

SEQ ID NO: 35597 - protein, 226 aa, synthetic construct; identical to SEQ ID NO: 35467
  source 1..226: note = Description of Artificial Sequence: Synthetic polypeptide; note = XENP023222 7G8_H3.71_L1.39_Fab Heavy Chain

SEQ ID NO: 35598 - protein, 121 aa, synthetic construct; identical to SEQ ID NO: 35468
  source 1..121: note = Description of Artificial Sequence: Synthetic polypeptide; note = VH of XENP023222

SEQ ID NO: 35599 - protein, 5 aa, synthetic construct
  source 1..5: note = Description of Artificial Sequence: Synthetic peptide; note = XENP023222 vhCDR1
DAWMS

SEQ ID NO: 35600 - protein, 19 aa, synthetic construct
  source 1..19: note = Description of Artificial Sequence: Synthetic peptide; note = XENP023222 vhCDR2
EISTKAYNHATYYAESVKG

SEQ ID NO: 35601 - protein, 10 aa, synthetic construct
  source 1..10: note = Description of Artificial Sequence: Synthetic peptide; note = XENP023222 vhCDR3
LATWDWYFDV

SEQ ID NO: 35602 - protein, 218 aa, synthetic construct; identical to SEQ ID NO: 35532
  source 1..218: note = Description of Artificial Sequence: Synthetic polypeptide; note = XENP023222 7G8_H3.71_L1.39_Fab Light Chain

SEQ ID NO: 35603 - protein, 111 aa, synthetic construct; identical to SEQ ID NO: 35533
  source 1..111: note = Description of Artificial Sequence: Synthetic polypeptide; note = VL of XENP023222

SEQ ID NO: 35604 - protein, 15 aa, synthetic construct
  source 1..15: note = Description of Artificial Sequence: Synthetic peptide; note = XENP023222 vlCDR1
RASQSVDYYGDSYMN

SEQ ID NO: 35605 - protein, 7 aa, synthetic construct
  source 1..7: note = Description of Artificial Sequence: Synthetic peptide; note = XENP023222 vlCDR2
AASELES

SEQ ID NO: 35606 - protein, 9 aa, synthetic construct
  source 1..9: note = Description of Artificial Sequence: Synthetic peptide; note = XENP023222 vlCDR3
QQSNEDPFT

SEQ ID NO: 35607 - protein, 450 aa, synthetic construct
  source 1..450: note = Description of Artificial Sequence: Synthetic polypeptide; note = XENP022841 7G8_H3.30_L1.34_Fab-[CTLA-4]_H3.23_L0.129_scFv Fab -Fc Heavy Chain
EVQLVESGGGLVQPGGSLRLSCAASGFTFDDAWMSWVRQAPGKGLEWVAEISTKANNHATYYAESVKGRFTISRDDSKSSVYLQMNSLRAEDTAVYYCTRLATWDWYFDVWGQGTTVTVSSASTKGPSVFPLAPSSKSTSGGTAALGCLVKDYFPEPVTVSWNSGALTSGVHTFPAVLQSSGLYSLSSVVTVPSSSLGTQTYICNVNHKPSDTKVDKKVEPKSCDKTHTCPPCPAPPVAGPSVFLFPPKPKDTLMISRTPEVTCVVVDVKHEDPEVKFNWYVDGVEVHNAKTKPREEEYNSTYRVVSVLTVLHQDWLNGKEYKCKVSNKALPAPIEKTISKAKGQPREPQVYTLPPSREEMTKNQVSLTCDVSGFYPSDIAVEWESDGQPENNYKTTPPVLDSDGSFFLYSKLTVDKSRWEQGDVFSCSVLHEALHSHYTQKSLSLSPGK

SEQ ID NO: 35608 - protein, 121 aa, synthetic construct; identical to SEQ ID NO: 22485
  source 1..121: note = Description of Artificial Sequence: Synthetic polypeptide; note = VH of XENP022841

SEQ ID NO: 35609 - protein, 5 aa, synthetic construct
  source 1..5: note = Description of Artificial Sequence: Synthetic peptide; note = XENP022841 vhCDR1
DAWMS

SEQ ID NO: 35610 - protein, 19 aa, synthetic construct
  source 1..19: note = Description of Artificial Sequence: Synthetic peptide; note = XENP022841 vhCDR2
EISTKANNHATYYAESVKG

SEQ ID NO: 35611 - protein, 10 aa, synthetic construct
  source 1..10: note = Description of Artificial Sequence: Synthetic peptide; note = XENP022841 vhCDR3
LATWDWYFDV

SEQ ID NO: 35612 - protein, 477 aa, synthetic construct
  source 1..477: note = Description of Artificial Sequence: Synthetic polypeptide; note = XENP022841 7G8_H3.30_L1.34_Fab-[CTLA-4]_H3.23_L0.129_scFv  scFv-Fc Heavy Chain
EVQLVESGGGLVKPGGSLRLSCAASGFTFSSYTMHWVRQAPGKGLEWVSFISYDGNYKYYADSVKGRFTISRDNAKNSLYLQMNSLRAEDTAVYYCARGGHLGPFDLWGQGTMVTVSSGKPGSGKPGSGKPGSGKPGSEIVLTQSPATLSLSPGERATLSCRASQSVGSSYLAWYQQKPGQAPRLLIYGASSRATGIPDRFSGSGSGTDFTLTISRLEPEDFAVYYCQQYGSSPWTFGQGTKVEIKEPKSSDKTHTCPPCPAPPVAGPSVFLFPPKPKDTLMISRTPEVTCVVVDVKHEDPEVKFNWYVDGVEVHNAKTKPREEQYNSTYRVVSVLTVLHQDWLNGKEYKCKVSNKALPAPIEKTISKAKGQPREPQVYTLPPSREQMTKNQVKLTCLVKGFYPSDIAVEWESNGQPENNYKTTPPVLDSDGSFFLYSKLTVDKSRWQQGNVFSCSVLHEALHSHYTQKSLSLSPGK

SEQ ID NO: 35613 - protein, 118 aa, synthetic construct; identical to SEQ ID NO: 2632
  source 1..118: note = Description of Artificial Sequence: Synthetic polypeptide; note = VH of XENP022841

SEQ ID NO: 35614 - protein, 108 aa, synthetic construct; identical to SEQ ID NO: 2768
  source 1..108: note = Description of Artificial Sequence: Synthetic polypeptide; note = VL of XENP022841

SEQ ID NO: 35615 - protein, 231 aa, synthetic construct; identical to SEQ ID NO: 21572
  source 1..231: note = Description of Artificial Sequence: Synthetic polypeptide; note = Fc chain of XENP022841

SEQ ID NO: 35616 - protein, 5 aa, synthetic construct
  source 1..5: note = Description of Artificial Sequence: Synthetic peptide; note = XENP022841 vhCDR1
SYTMH

SEQ ID NO: 35617 - protein, 17 aa, synthetic construct
  source 1..17: note = Description of Artificial Sequence: Synthetic peptide; note = XENP022841 vhCDR2
FISYDGNYKYYADSVKG

SEQ ID NO: 35618 - protein, 9 aa, synthetic construct
  source 1..9: note = Description of Artificial Sequence: Synthetic peptide; note = XENP022841 vhCDR3
GGHLGPFDL

SEQ ID NO: 35619 - protein, 12 aa, synthetic construct
  source 1..12: note = Description of Artificial Sequence: Synthetic peptide; note = XENP022841 vlCDR1
RASQSVGSSYLA

SEQ ID NO: 35620 - protein, 7 aa, synthetic construct
  source 1..7: note = Description of Artificial Sequence: Synthetic peptide; note = XENP022841 vlCDR2
GASSRAT

SEQ ID NO: 35621 - protein, 9 aa, synthetic construct
  source 1..9: note = Description of Artificial Sequence: Synthetic peptide; note = XENP022841 vlCDR3
QQYGSSPWT

SEQ ID NO: 35622 - protein, 218 aa, synthetic construct; identical to SEQ ID NO: 22599
  source 1..218: note = Description of Artificial Sequence: Synthetic polypeptide; note = XENP022841 7G8_H3.30_L1.34_Fab-[CTLA-4]_H3.23_L0.129_scFv Light Chain

SEQ ID NO: 35623 - protein, 111 aa, synthetic construct; identical to SEQ ID NO: 22600
  source 1..111: note = Description of Artificial Sequence: Synthetic polypeptide; note = VL of XENP022841

SEQ ID NO: 35624 - protein, 15 aa, synthetic construct
  source 1..15: note = Description of Artificial Sequence: Synthetic peptide; note = XENP022841 vlCDR1
RASQSVDYDGDSYMN

SEQ ID NO: 35625 - protein, 7 aa, synthetic construct
  source 1..7: note = Description of Artificial Sequence: Synthetic peptide; note = XENP022841 vlCDR2
AASELES

SEQ ID NO: 35626 - protein, 9 aa, synthetic construct
  source 1..9: note = Description of Artificial Sequence: Synthetic peptide; note = XENP022841 vlCDR3
QQSNEDPFT

SEQ ID NO: 35627 - protein, 450 aa, synthetic construct; identical to SEQ ID NO: 35607
  source 1..450: note = Description of Artificial Sequence: Synthetic polypeptide; note = XENP022842 7G8_H3.30_L1.36_Fab-[CTLA-4]_H3.23_L0.129_scFv  Fab-Fc Heavy Chain

SEQ ID NO: 35628 - protein, 121 aa, synthetic construct; identical to SEQ ID NO: 22485
  source 1..121: note = Description of Artificial Sequence: Synthetic polypeptide; note = VH of XENP022842

SEQ ID NO: 35629 - protein, 5 aa, synthetic construct
  source 1..5: note = Description of Artificial Sequence: Synthetic peptide; note = XENP022842 vhCDR1
DAWMS

SEQ ID NO: 35630 - protein, 19 aa, synthetic construct
  source 1..19: note = Description of Artificial Sequence: Synthetic peptide; note = XENP022842 vhCDR2
EISTKANNHATYYAESVKG

SEQ ID NO: 35631 - protein, 10 aa, synthetic construct
  source 1..10: note = Description of Artificial Sequence: Synthetic peptide; note = XENP022842 vhCDR3
LATWDWYFDV

SEQ ID NO: 35632 - protein, 477 aa, synthetic construct; identical to SEQ ID NO: 35612
  source 1..477: note = Description of Artificial Sequence: Synthetic polypeptide; note = XENP022842 7G8_H3.30_L1.36_Fab-[CTLA-4]_H3.23_L0.129_scFv sc Fv-Fc Heavy Chain

SEQ ID NO: 35633 - protein, 118 aa, synthetic construct; identical to SEQ ID NO: 2632
  source 1..118: note = Description of Artificial Sequence: Synthetic polypeptide; note = VH of XENP022842

SEQ ID NO: 35634 - protein, 108 aa, synthetic construct; identical to SEQ ID NO: 2768
  source 1..108: note = Description of Artificial Sequence: Synthetic polypeptide; note = VL of XENP022842

SEQ ID NO: 35635 - protein, 231 aa, synthetic construct; identical to SEQ ID NO: 21572
  source 1..231: note = Description of Artificial Sequence: Synthetic polypeptide; note = Fc chain of XENP022842

SEQ ID NO: 35636 - protein, 5 aa, synthetic construct
  source 1..5: note = Description of Artificial Sequence: Synthetic peptide; note = XENP022842 vhCDR1
SYTMH

SEQ ID NO: 35637 - protein, 17 aa, synthetic construct
  source 1..17: note = Description of Artificial Sequence: Synthetic peptide; note = XENP022842 vhCDR2
FISYDGNYKYYADSVKG

SEQ ID NO: 35638 - protein, 9 aa, synthetic construct
  source 1..9: note = Description of Artificial Sequence: Synthetic peptide; note = XENP022842 vhCDR3
GGHLGPFDL

SEQ ID NO: 35639 - protein, 12 aa, synthetic construct
  source 1..12: note = Description of Artificial Sequence: Synthetic peptide; note = XENP022842 vlCDR1
RASQSVGSSYLA

SEQ ID NO: 35640 - protein, 7 aa, synthetic construct
  source 1..7: note = Description of Artificial Sequence: Synthetic peptide; note = XENP022842 vlCDR2
GASSRAT

SEQ ID NO: 35641 - protein, 9 aa, synthetic construct
  source 1..9: note = Description of Artificial Sequence: Synthetic peptide; note = XENP022842 vlCDR3
QQYGSSPWT

SEQ ID NO: 35642 - protein, 218 aa, synthetic construct; identical to SEQ ID NO: 22619
  source 1..218: note = Description of Artificial Sequence: Synthetic polypeptide; note = XENP022842 7G8_H3.30_L1.36_Fab-[CTLA-4]_H3.23_L0.129_scFv Light Chain

SEQ ID NO: 35643 - protein, 111 aa, synthetic construct; identical to SEQ ID NO: 22620
  source 1..111: note = Description of Artificial Sequence: Synthetic polypeptide; note = VL of XENP022842

SEQ ID NO: 35644 - protein, 15 aa, synthetic construct
  source 1..15: note = Description of Artificial Sequence: Synthetic peptide; note = XENP022842 vlCDR1
RASQSVDHDGDSYMN

SEQ ID NO: 35645 - protein, 7 aa, synthetic construct
  source 1..7: note = Description of Artificial Sequence: Synthetic peptide; note = XENP022842 vlCDR2
AASELES

SEQ ID NO: 35646 - protein, 9 aa, synthetic construct
  source 1..9: note = Description of Artificial Sequence: Synthetic peptide; note = XENP022842 vlCDR3
QQSNEDPFT

SEQ ID NO: 35647 - protein, 447 aa, synthetic construct
  source 1..447: note = Description of Artificial Sequence: Synthetic polypeptide; note = XENP022843 2A11_H1.144_L2.142_Fab-[CTLA-4]_H3.23_L0.129_scFv  Fab-Fc Heavy Chain
EVQLVQSGAEVKKPGATVKISCKASGFNIKDYFMHWVQQAPGKGLEWMGWIDPELGDTEYAPKFQGRVTITADTSTNTAYMELSSLRSEDTAVYYCYARGVYQALDYWGQGTLVTVSSASTKGPSVFPLAPSSKSTSGGTAALGCLVKDYFPEPVTVSWNSGALTSGVHTFPAVLQSSGLYSLSSVVTVPSSSLGTQTYICNVNHKPSDTKVDKKVEPKSCDKTHTCPPCPAPPVAGPSVFLFPPKPKDTLMISRTPEVTCVVVDVKHEDPEVKFNWYVDGVEVHNAKTKPREEEYNSTYRVVSVLTVLHQDWLNGKEYKCKVSNKALPAPIEKTISKAKGQPREPQVYTLPPSREEMTKNQVSLTCDVSGFYPSDIAVEWESDGQPENNYKTTPPVLDSDGSFFLYSKLTVDKSRWEQGDVFSCSVLHEALHSHYTQKSLSLSPGK

SEQ ID NO: 35648 - protein, 118 aa, synthetic construct; identical to SEQ ID NO: 22085
  source 1..118: note = Description of Artificial Sequence: Synthetic polypeptide; note = VH of XENP022843

SEQ ID NO: 35649 - protein, 5 aa, synthetic construct
  source 1..5: note = Description of Artificial Sequence: Synthetic peptide; note = XENP022843 vhCDR1
DYFMH

SEQ ID NO: 35650 - protein, 17 aa, synthetic construct
  source 1..17: note = Description of Artificial Sequence: Synthetic peptide; note = XENP022843 vhCDR2
WIDPELGDTEYAPKFQG

SEQ ID NO: 35651 - protein, 9 aa, synthetic construct
  source 1..9: note = Description of Artificial Sequence: Synthetic peptide; note = XENP022843 vhCDR3
RGVYQALDY

SEQ ID NO: 35652 - protein, 477 aa, synthetic construct; identical to SEQ ID NO: 35612
  source 1..477: note = Description of Artificial Sequence: Synthetic polypeptide; note = XENP022843 2A11_H1.144_L2.142_Fab-[CTLA-4]_H3.23_L0.129_scFv  scFv-Fc Heavy Chain

SEQ ID NO: 35653 - protein, 118 aa, synthetic construct; identical to SEQ ID NO: 2632
  source 1..118: note = Description of Artificial Sequence: Synthetic polypeptide; note = VH of XENP022843

SEQ ID NO: 35654 - protein, 108 aa, synthetic construct; identical to SEQ ID NO: 2768
  source 1..108: note = Description of Artificial Sequence: Synthetic polypeptide; note = VL of XENP022843

SEQ ID NO: 35655 - protein, 231 aa, synthetic construct; identical to SEQ ID NO: 21572
  source 1..231: note = Description of Artificial Sequence: Synthetic polypeptide; note = Fc chain of XENP022843

SEQ ID NO: 35656 - protein, 5 aa, synthetic construct
  source 1..5: note = Description of Artificial Sequence: Synthetic peptide; note = XENP022843 vhCDR1
SYTMH

SEQ ID NO: 35657 - protein, 17 aa, synthetic construct
  source 1..17: note = Description of Artificial Sequence: Synthetic peptide; note = XENP022843 vhCDR2
FISYDGNYKYYADSVKG

SEQ ID NO: 35658 - protein, 9 aa, synthetic construct
  source 1..9: note = Description of Artificial Sequence: Synthetic peptide; note = XENP022843 vhCDR3
GGHLGPFDL

SEQ ID NO: 35659 - protein, 12 aa, synthetic construct
  source 1..12: note = Description of Artificial Sequence: Synthetic peptide; note = XENP022843 vlCDR1
RASQSVGSSYLA

SEQ ID NO: 35660 - protein, 7 aa, synthetic construct
  source 1..7: note = Description of Artificial Sequence: Synthetic peptide; note = XENP022843 vlCDR2
GASSRAT

SEQ ID NO: 35661 - protein, 9 aa, synthetic construct
  source 1..9: note = Description of Artificial Sequence: Synthetic peptide; note = XENP022843 vlCDR3
QQYGSSPWT

SEQ ID NO: 35662 - protein, 214 aa, synthetic construct; identical to SEQ ID NO: 22279
  source 1..214: note = Description of Artificial Sequence: Synthetic polypeptide; note = XENP022843 2A11_H1.144_L2.142_Fab-[CTLA-4]_H3.23_L0.129_scFv Light Chain

SEQ ID NO: 35663 - protein, 107 aa, synthetic construct; identical to SEQ ID NO: 22280
  source 1..107: note = Description of Artificial Sequence: Synthetic polypeptide; note = VL of XENP022843

SEQ ID NO: 35664 - protein, 11 aa, synthetic construct
  source 1..11: note = Description of Artificial Sequence: Synthetic peptide; note = XENP022843 vlCDR1
QASQDIGNYLN

SEQ ID NO: 35665 - protein, 7 aa, synthetic construct
  source 1..7: note = Description of Artificial Sequence: Synthetic peptide; note = XENP022843 vlCDR2
FTSYLHS

SEQ ID NO: 35666 - protein, 9 aa, synthetic construct
  source 1..9: note = Description of Artificial Sequence: Synthetic peptide; note = XENP022843 vlCDR3
QQGNTLPYT

SEQ ID NO: 35667 - protein, 447 aa, synthetic construct; identical to SEQ ID NO: 35647
  source 1..447: note = Description of Artificial Sequence: Synthetic polypeptide; note = XENP022844 2A11_H1.144_L2.113_Fab-[CTLA-4]_H3.23_L0.129_scFv Fab-Fc Heavy Chain

SEQ ID NO: 35668 - protein, 118 aa, synthetic construct; identical to SEQ ID NO: 22085
  source 1..118: note = Description of Artificial Sequence: Synthetic polypeptide; note = VH of XENP022844

SEQ ID NO: 35669 - protein, 5 aa, synthetic construct
  source 1..5: note = Description of Artificial Sequence: Synthetic peptide; note = XENP022844 vhCDR1
DYFMH

SEQ ID NO: 35670 - protein, 17 aa, synthetic construct
  source 1..17: note = Description of Artificial Sequence: Synthetic peptide; note = XENP022844 vhCDR2
WIDPELGDTEYAPKFQG

SEQ ID NO: 35671 - protein, 9 aa, synthetic construct
  source 1..9: note = Description of Artificial Sequence: Synthetic peptide; note = XENP022844 vhCDR3
RGVYQALDY

SEQ ID NO: 35672 - protein, 477 aa, synthetic construct; identical to SEQ ID NO: 35612
  source 1..477: note = Description of Artificial Sequence: Synthetic polypeptide; note = XENP022844 2A11_H1.144_L2.113_Fab-[CTLA-4]_H3.23_L0.129_scFv scFv-Fc Heavy Chain

SEQ ID NO: 35673 - protein, 118 aa, synthetic construct; identical to SEQ ID NO: 2632
  source 1..118: note = Description of Artificial Sequence: Synthetic polypeptide; note = VH of XENP022844

SEQ ID NO: 35674 - protein, 108 aa, synthetic construct; identical to SEQ ID NO: 2768
  source 1..108: note = Description of Artificial Sequence: Synthetic polypeptide; note = VL of XENP022844

SEQ ID NO: 35675 - protein, 231 aa, synthetic construct; identical to SEQ ID NO: 21572
  source 1..231: note = Description of Artificial Sequence: Synthetic polypeptide; note = Fc chain of XENP022844

SEQ ID NO: 35676 - protein, 5 aa, synthetic construct
  source 1..5: note = Description of Artificial Sequence: Synthetic peptide; note = XENP022844 vhCDR1
SYTMH

SEQ ID NO: 35677 - protein, 17 aa, synthetic construct
  source 1..17: note = Description of Artificial Sequence: Synthetic peptide; note = XENP022844 vhCDR2
FISYDGNYKYYADSVKG

SEQ ID NO: 35678 - protein, 9 aa, synthetic construct
  source 1..9: note = Description of Artificial Sequence: Synthetic peptide; note = XENP022844 vhCDR3
GGHLGPFDL

SEQ ID NO: 35679 - protein, 12 aa, synthetic construct
  source 1..12: note = Description of Artificial Sequence: Synthetic peptide; note = XENP022844 vlCDR1
RASQSVGSSYLA

SEQ ID NO: 35680 - protein, 7 aa, synthetic construct
  source 1..7: note = Description of Artificial Sequence: Synthetic peptide; note = XENP022844 vlCDR2
GASSRAT

SEQ ID NO: 35681 - protein, 9 aa, synthetic construct
  source 1..9: note = Description of Artificial Sequence: Synthetic peptide; note = XENP022844 vlCDR3
QQYGSSPWT

SEQ ID NO: 35682 - protein, 214 aa, synthetic construct; identical to SEQ ID NO: 22079
  source 1..214: note = Description of Artificial Sequence: Synthetic polypeptide; note = XENP022844 2A11_H1.144_L2.113_Fab-[CTLA-4]_H3.23_L0.129_scFv Light Chain

SEQ ID NO: 35683 - protein, 107 aa, synthetic construct; identical to SEQ ID NO: 22080
  source 1..107: note = Description of Artificial Sequence: Synthetic polypeptide; note = VL of XENP022844

SEQ ID NO: 35684 - protein, 11 aa, synthetic construct
  source 1..11: note = Description of Artificial Sequence: Synthetic peptide; note = XENP022844 vlCDR1
QASQDIGNYLN

SEQ ID NO: 35685 - protein, 7 aa, synthetic construct
  source 1..7: note = Description of Artificial Sequence: Synthetic peptide; note = XENP022844 vlCDR2
FTSYLHS

SEQ ID NO: 35686 - protein, 9 aa, synthetic construct
  source 1..9: note = Description of Artificial Sequence: Synthetic peptide; note = XENP022844 vlCDR3
QQGNTLPYT

SEQ ID NO: 35687 - protein, 447 aa, synthetic construct; identical to SEQ ID NO: 21564
  source 1..447: note = Description of Artificial Sequence: Synthetic polypeptide; note = XENP022845 2A11_H1_L2.113_Fab-[CTLA-4]_H3.23_L0.129_scFv Fab -Fc Heavy Chain

SEQ ID NO: 35688 - protein, 118 aa, synthetic construct; identical to SEQ ID NO: 17236
  source 1..118: note = Description of Artificial Sequence: Synthetic polypeptide; note = VH of XENP022845

SEQ ID NO: 35689 - protein, 5 aa, synthetic construct
  source 1..5: note = Description of Artificial Sequence: Synthetic peptide; note = XENP022845 vhCDR1
DYYMH

SEQ ID NO: 35690 - protein, 17 aa, synthetic construct
  source 1..17: note = Description of Artificial Sequence: Synthetic peptide; note = XENP022845 vhCDR2
WIDPENGDTEYAPKFQG

SEQ ID NO: 35691 - protein, 9 aa, synthetic construct
  source 1..9: note = Description of Artificial Sequence: Synthetic peptide; note = XENP022845 vhCDR3
RGVRQALDY

SEQ ID NO: 35692 - protein, 477 aa, synthetic construct; identical to SEQ ID NO: 35612
  source 1..477: note = Description of Artificial Sequence: Synthetic polypeptide; note = XENP022845 2A11_H1_L2.113_Fab-[CTLA-4]_H3.23_L0.129_scFv scFv -Fc Heavy Chain

SEQ ID NO: 35693 - protein, 118 aa, synthetic construct; identical to SEQ ID NO: 2632
  source 1..118: note = Description of Artificial Sequence: Synthetic polypeptide; note = VH of XENP022845

SEQ ID NO: 35694 - protein, 108 aa, synthetic construct; identical to SEQ ID NO: 2768
  source 1..108: note = Description of Artificial Sequence: Synthetic polypeptide; note = VL of XENP022845

SEQ ID NO: 35695 - protein, 231 aa, synthetic construct; identical to SEQ ID NO: 21572
  source 1..231: note = Description of Artificial Sequence: Synthetic polypeptide; note = Fc chain of XENP022845

SEQ ID NO: 35696 - protein, 5 aa, synthetic construct
  source 1..5: note = Description of Artificial Sequence: Synthetic peptide; note = XENP022845 vhCDR1
SYTMH

SEQ ID NO: 35697 - protein, 17 aa, synthetic construct
  source 1..17: note = Description of Artificial Sequence: Synthetic peptide; note = XENP022845 vhCDR2
FISYDGNYKYYADSVKG

SEQ ID NO: 35698 - protein, 9 aa, synthetic construct
  source 1..9: note = Description of Artificial Sequence: Synthetic peptide; note = XENP022845 vhCDR3
GGHLGPFDL

SEQ ID NO: 35699 - protein, 12 aa, synthetic construct
  source 1..12: note = Description of Artificial Sequence: Synthetic peptide; note = XENP022845 vlCDR1
RASQSVGSSYLA

SEQ ID NO: 35700 - protein, 7 aa, synthetic construct
  source 1..7: note = Description of Artificial Sequence: Synthetic peptide; note = XENP022845 vlCDR2
GASSRAT

SEQ ID NO: 35701 - protein, 9 aa, synthetic construct
  source 1..9: note = Description of Artificial Sequence: Synthetic peptide; note = XENP022845 vlCDR3
QQYGSSPWT

SEQ ID NO: 35702 - protein, 214 aa, synthetic construct; identical to SEQ ID NO: 22079
  source 1..214: note = Description of Artificial Sequence: Synthetic polypeptide; note = XENP022845 2A11_H1_L2.113_Fab-[CTLA-4]_H3.23_L0.129_scFv Light Chain

SEQ ID NO: 35703 - protein, 107 aa, synthetic construct; identical to SEQ ID NO: 22080
  source 1..107: note = Description of Artificial Sequence: Synthetic polypeptide; note = VL of XENP022845

SEQ ID NO: 35704 - protein, 11 aa, synthetic construct
  source 1..11: note = Description of Artificial Sequence: Synthetic peptide; note = XENP022845 vlCDR1
QASQDIGNYLN

SEQ ID NO: 35705 - protein, 7 aa, synthetic construct
  source 1..7: note = Description of Artificial Sequence: Synthetic peptide; note = XENP022845 vlCDR2
FTSYLHS

SEQ ID NO: 35706 - protein, 9 aa, synthetic construct
  source 1..9: note = Description of Artificial Sequence: Synthetic peptide; note = XENP022845 vlCDR3
QQGNTLPYT

SEQ ID NO: 35707 - protein, 447 aa, synthetic construct
  source 1..447: note = Description of Artificial Sequence: Synthetic polypeptide; note = XENP022846 2A11_H1.125_L2.126_Fab-[CTLA-4]_H3.23_L0.129_scFv  Fab-Fc Heavy Chain
EVQLVQSGAEVKKPGATVKISCKASGFNIKHYFMHWVQQAPGKGLEWMGWIDPYLGDTEYAPKFQGRVTITADTSTNTAYMELSSLRSEDTAVYYCYARGVYQALDYWGQGTLVTVSSASTKGPSVFPLAPSSKSTSGGTAALGCLVKDYFPEPVTVSWNSGALTSGVHTFPAVLQSSGLYSLSSVVTVPSSSLGTQTYICNVNHKPSDTKVDKKVEPKSCDKTHTCPPCPAPPVAGPSVFLFPPKPKDTLMISRTPEVTCVVVDVKHEDPEVKFNWYVDGVEVHNAKTKPREEEYNSTYRVVSVLTVLHQDWLNGKEYKCKVSNKALPAPIEKTISKAKGQPREPQVYTLPPSREEMTKNQVSLTCDVSGFYPSDIAVEWESDGQPENNYKTTPPVLDSDGSFFLYSKLTVDKSRWEQGDVFSCSVLHEALHSHYTQKSLSLSPGK

SEQ ID NO: 35708 - protein, 118 aa, synthetic construct; identical to SEQ ID NO: 22065
  source 1..118: note = Description of Artificial Sequence: Synthetic polypeptide; note = VH of XENP022846

SEQ ID NO: 35709 - protein, 5 aa, synthetic construct
  source 1..5: note = Description of Artificial Sequence: Synthetic peptide; note = XENP022846 vhCDR1
HYFMH

SEQ ID NO: 35710 - protein, 17 aa, synthetic construct
  source 1..17: note = Description of Artificial Sequence: Synthetic peptide; note = XENP022846 vhCDR2
WIDPYLGDTEYAPKFQG

SEQ ID NO: 35711 - protein, 9 aa, synthetic construct
  source 1..9: note = Description of Artificial Sequence: Synthetic peptide; note = XENP022846 vhCDR3
RGVYQALDY

SEQ ID NO: 35712 - protein, 477 aa, synthetic construct; identical to SEQ ID NO: 35612
  source 1..477: note = Description of Artificial Sequence: Synthetic polypeptide; note = XENP022846 2A11_H1.125_L2.126_Fab-[CTLA-4]_H3.23_L0.129_scFv scFv-Fc Heavy Chain

SEQ ID NO: 35713 - protein, 118 aa, synthetic construct; identical to SEQ ID NO: 2632
  source 1..118: note = Description of Artificial Sequence: Synthetic polypeptide; note = VH of XENP022846

SEQ ID NO: 35714 - protein, 108 aa, synthetic construct; identical to SEQ ID NO: 2768
  source 1..108: note = Description of Artificial Sequence: Synthetic polypeptide; note = VL of XENP022846

SEQ ID NO: 35715 - protein, 231 aa, synthetic construct; identical to SEQ ID NO: 21572
  source 1..231: note = Description of Artificial Sequence: Synthetic polypeptide; note = Fc chain of XENP022846

SEQ ID NO: 35716 - protein, 5 aa, synthetic construct
  source 1..5: note = Description of Artificial Sequence: Synthetic peptide; note = XENP022846 vhCDR1
SYTMH

SEQ ID NO: 35717 - protein, 17 aa, synthetic construct
  source 1..17: note = Description of Artificial Sequence: Synthetic peptide; note = XENP022846 vhCDR2
FISYDGNYKYYADSVKG

SEQ ID NO: 35718 - protein, 9 aa, synthetic construct
  source 1..9: note = Description of Artificial Sequence: Synthetic peptide; note = XENP022846 vhCDR3
GGHLGPFDL

SEQ ID NO: 35719 - protein, 12 aa, synthetic construct
  source 1..12: note = Description of Artificial Sequence: Synthetic peptide; note = XENP022846 vlCDR1
RASQSVGSSYLA

SEQ ID NO: 35720 - protein, 7 aa, synthetic construct
  source 1..7: note = Description of Artificial Sequence: Synthetic peptide; note = XENP022846 vlCDR2
GASSRAT

SEQ ID NO: 35721 - protein, 9 aa, synthetic construct
  source 1..9: note = Description of Artificial Sequence: Synthetic peptide; note = XENP022846 vlCDR3
QQYGSSPWT

SEQ ID NO: 35722 - protein, 214 aa, synthetic construct; identical to SEQ ID NO: 22259
  source 1..214: note = Description of Artificial Sequence: Synthetic polypeptide; note = XENP022846 2A11_H1.125_L2.126_Fab-[CTLA-4]_H3.23_L0.129_scFv  Light Chain

SEQ ID NO: 35723 - protein, 107 aa, synthetic construct; identical to SEQ ID NO: 22260
  source 1..107: note = Description of Artificial Sequence: Synthetic polypeptide; note = VL of XENP022846

SEQ ID NO: 35724 - protein, 11 aa, synthetic construct
  source 1..11: note = Description of Artificial Sequence: Synthetic peptide; note = XENP022846 vlCDR1
QASQDIGNYLN

SEQ ID NO: 35725 - protein, 7 aa, synthetic construct
  source 1..7: note = Description of Artificial Sequence: Synthetic peptide; note = XENP022846 vlCDR2
FTSYLHS

SEQ ID NO: 35726 - protein, 9 aa, synthetic construct
  source 1..9: note = Description of Artificial Sequence: Synthetic peptide; note = XENP022846 vlCDR3
QEGNTLPYT

SEQ ID NO: 35727 - protein, 450 aa, synthetic construct
  source 1..450: note = Description of Artificial Sequence: Synthetic polypeptide; note = XENP023223 7G8_H3.66_L1.34_Fab-[CTLA-4]_H3.23_L0.129_scFv Fab -Fc Heavy Chain
EVQLVESGGGLVQPGGSLRLSCAASGFTFDEAWMSWVRQAPGKGLEWVAEISTKANNHATYYAESVKGRFTISRDDSKSSVYLQMNSLRAEDTAVYYCTRLATWDWYFDVWGQGTTVTVSSASTKGPSVFPLAPSSKSTSGGTAALGCLVKDYFPEPVTVSWNSGALTSGVHTFPAVLQSSGLYSLSSVVTVPSSSLGTQTYICNVNHKPSDTKVDKKVEPKSCDKTHTCPPCPAPPVAGPSVFLFPPKPKDTLMISRTPEVTCVVVDVKHEDPEVKFNWYVDGVEVHNAKTKPREEEYNSTYRVVSVLTVLHQDWLNGKEYKCKVSNKALPAPIEKTISKAKGQPREPQVYTLPPSREEMTKNQVSLTCDVSGFYPSDIAVEWESDGQPENNYKTTPPVLDSDGSFFLYSKLTVDKSRWEQGDVFSCSVMHEALHNHYTQKSLSLSPGK

SEQ ID NO: 35728 - protein, 121 aa, synthetic construct; identical to SEQ ID NO: 35418
  source 1..121: note = Description of Artificial Sequence: Synthetic polypeptide; note = VH of XENP023223

SEQ ID NO: 35729 - protein, 5 aa, synthetic construct
  source 1..5: note = Description of Artificial Sequence: Synthetic peptide; note = XENP023223 vhCDR1
EAWMS

SEQ ID NO: 35730 - protein, 19 aa, synthetic construct
  source 1..19: note = Description of Artificial Sequence: Synthetic peptide; note = XENP023223 vhCDR2
EISTKANNHATYYAESVKG

SEQ ID NO: 35731 - protein, 10 aa, synthetic construct
  source 1..10: note = Description of Artificial Sequence: Synthetic peptide; note = XENP023223 vhCDR3
LATWDWYFDV

SEQ ID NO: 35732 - protein, 477 aa, synthetic construct; identical to SEQ ID NO: 21669
  source 1..477: note = Description of Artificial Sequence: Synthetic polypeptide; note = XENP023223 7G8_H3.66_L1.34_Fab-[CTLA-4]_H3.23_L0.129_scFv scFv -Fc Heavy Chain

SEQ ID NO: 35733 - protein, 118 aa, synthetic construct; identical to SEQ ID NO: 2632
  source 1..118: note = Description of Artificial Sequence: Synthetic polypeptide; note = VH of XENP023223

SEQ ID NO: 35734 - protein, 108 aa, synthetic construct; identical to SEQ ID NO: 2768
  source 1..108: note = Description of Artificial Sequence: Synthetic polypeptide; note = VL of XENP023223

SEQ ID NO: 35735 - protein, 231 aa, synthetic construct; identical to SEQ ID NO: 21532
  source 1..231: note = Description of Artificial Sequence: Synthetic polypeptide; note = Fc chain of XENP023223

SEQ ID NO: 35736 - protein, 5 aa, synthetic construct
  source 1..5: note = Description of Artificial Sequence: Synthetic peptide; note = XENP023223 vhCDR1
SYTMH

SEQ ID NO: 35737 - protein, 17 aa, synthetic construct
  source 1..17: note = Description of Artificial Sequence: Synthetic peptide; note = XENP023223 vhCDR2
FISYDGNYKYYADSVKG

SEQ ID NO: 35738 - protein, 9 aa, synthetic construct
  source 1..9: note = Description of Artificial Sequence: Synthetic peptide; note = XENP023223 vhCDR3
GGHLGPFDL

SEQ ID NO: 35739 - protein, 12 aa, synthetic construct
  source 1..12: note = Description of Artificial Sequence: Synthetic peptide; note = XENP023223 vlCDR1
RASQSVGSSYLA

SEQ ID NO: 35740 - protein, 7 aa, synthetic construct
  source 1..7: note = Description of Artificial Sequence: Synthetic peptide; note = XENP023223 vlCDR2
GASSRAT

SEQ ID NO: 35741 - protein, 9 aa, synthetic construct
  source 1..9: note = Description of Artificial Sequence: Synthetic peptide; note = XENP023223 vlCDR3
QQYGSSPWT

SEQ ID NO: 35742 - protein, 218 aa, synthetic construct; identical to SEQ ID NO: 22599
  source 1..218: note = Description of Artificial Sequence: Synthetic polypeptide; note = XENP023223 7G8_H3.66_L1.34_Fab-[CTLA-4]_H3.23_L0.129_scFv Light Chain

SEQ ID NO: 35743 - protein, 111 aa, synthetic construct; identical to SEQ ID NO: 22600
  source 1..111: note = Description of Artificial Sequence: Synthetic polypeptide; note = VL of XENP023223

SEQ ID NO: 35744 - protein, 15 aa, synthetic construct
  source 1..15: note = Description of Artificial Sequence: Synthetic peptide; note = XENP023223 vlCDR1
RASQSVDYDGDSYMN

SEQ ID NO: 35745 - protein, 7 aa, synthetic construct
  source 1..7: note = Description of Artificial Sequence: Synthetic peptide; note = XENP023223 vlCDR2
AASELES

SEQ ID NO: 35746 - protein, 9 aa, synthetic construct
  source 1..9: note = Description of Artificial Sequence: Synthetic peptide; note = XENP023223 vlCDR3
QQSNEDPFT

SEQ ID NO: 35747 - protein, 450 aa, synthetic construct
  source 1..450: note = Description of Artificial Sequence: Synthetic polypeptide; note = XENP023224 7G8_H3.67_L1.34_Fab-[CTLA-4]_H3.23_L0.129_scFv Fab -Fc Heavy Chain
EVQLVESGGGLVQPGGSLRLSCAASGFTFDDTWMSWVRQAPGKGLEWVAEISTKANNHATYYAESVKGRFTISRDDSKSSVYLQMNSLRAEDTAVYYCTRLATWDWYFDVWGQGTTVTVSSASTKGPSVFPLAPSSKSTSGGTAALGCLVKDYFPEPVTVSWNSGALTSGVHTFPAVLQSSGLYSLSSVVTVPSSSLGTQTYICNVNHKPSDTKVDKKVEPKSCDKTHTCPPCPAPPVAGPSVFLFPPKPKDTLMISRTPEVTCVVVDVKHEDPEVKFNWYVDGVEVHNAKTKPREEEYNSTYRVVSVLTVLHQDWLNGKEYKCKVSNKALPAPIEKTISKAKGQPREPQVYTLPPSREEMTKNQVSLTCDVSGFYPSDIAVEWESDGQPENNYKTTPPVLDSDGSFFLYSKLTVDKSRWEQGDVFSCSVMHEALHNHYTQKSLSLSPGK

SEQ ID NO: 35748 - protein, 121 aa, synthetic construct; identical to SEQ ID NO: 35428
  source 1..121: note = Description of Artificial Sequence: Synthetic polypeptide; note = VH of XENP023224

SEQ ID NO: 35749 - protein, 5 aa, synthetic construct
  source 1..5: note = Description of Artificial Sequence: Synthetic peptide; note = XENP023224 vhCDR1
DTWMS

SEQ ID NO: 35750 - protein, 19 aa, synthetic construct
  source 1..19: note = Description of Artificial Sequence: Synthetic peptide; note = XENP023224 vhCDR2
EISTKANNHATYYAESVKG

SEQ ID NO: 35751 - protein, 10 aa, synthetic construct
  source 1..10: note = Description of Artificial Sequence: Synthetic peptide; note = XENP023224 vhCDR3
LATWDWYFDV

SEQ ID NO: 35752 - protein, 477 aa, synthetic construct; identical to SEQ ID NO: 21669
  source 1..477: note = Description of Artificial Sequence: Synthetic polypeptide; note = XENP023224 7G8_H3.67_L1.34_Fab-[CTLA-4]_H3.23_L0.129_scFv scFv -Fc Heavy Chain

SEQ ID NO: 35753 - protein, 118 aa, synthetic construct; identical to SEQ ID NO: 2632
  source 1..118: note = Description of Artificial Sequence: Synthetic polypeptide; note = VH of XENP023224

SEQ ID NO: 35754 - protein, 108 aa, synthetic construct; identical to SEQ ID NO: 2768
  source 1..108: note = Description of Artificial Sequence: Synthetic polypeptide; note = VL of XENP023224

SEQ ID NO: 35755 - protein, 231 aa, synthetic construct; identical to SEQ ID NO: 21532
  source 1..231: note = Description of Artificial Sequence: Synthetic polypeptide; note = Fc chain of XENP023224

SEQ ID NO: 35756 - protein, 5 aa, synthetic construct
  source 1..5: note = Description of Artificial Sequence: Synthetic peptide; note = XENP023224 vhCDR1
SYTMH

SEQ ID NO: 35757 - protein, 17 aa, synthetic construct
  source 1..17: note = Description of Artificial Sequence: Synthetic peptide; note = XENP023224 vhCDR2
FISYDGNYKYYADSVKG

SEQ ID NO: 35758 - protein, 9 aa, synthetic construct
  source 1..9: note = Description of Artificial Sequence: Synthetic peptide; note = XENP023224 vhCDR3
GGHLGPFDL

SEQ ID NO: 35759 - protein, 12 aa, synthetic construct
  source 1..12: note = Description of Artificial Sequence: Synthetic peptide; note = XENP023224 vlCDR1
RASQSVGSSYLA

SEQ ID NO: 35760 - protein, 7 aa, synthetic construct
  source 1..7: note = Description of Artificial Sequence: Synthetic peptide; note = XENP023224 vlCDR2
GASSRAT

SEQ ID NO: 35761 - protein, 9 aa, synthetic construct
  source 1..9: note = Description of Artificial Sequence: Synthetic peptide; note = XENP023224 vlCDR3
QQYGSSPWT

SEQ ID NO: 35762 - protein, 218 aa, synthetic construct; identical to SEQ ID NO: 22599
  source 1..218: note = Description of Artificial Sequence: Synthetic polypeptide; note = XENP023224 7G8_H3.67_L1.34_Fab-[CTLA-4]_H3.23_L0.129_scFv  Light Chain

SEQ ID NO: 35763 - protein, 111 aa, synthetic construct; identical to SEQ ID NO: 22600
  source 1..111: note = Description of Artificial Sequence: Synthetic polypeptide; note = VL of XENP023224

SEQ ID NO: 35764 - protein, 15 aa, synthetic construct
  source 1..15: note = Description of Artificial Sequence: Synthetic peptide; note = XENP023224 vlCDR1
RASQSVDYDGDSYMN

SEQ ID NO: 35765 - protein, 7 aa, synthetic construct
  source 1..7: note = Description of Artificial Sequence: Synthetic peptide; note = XENP023224 vlCDR2
AASELES

SEQ ID NO: 35766 - protein, 9 aa, synthetic construct
  source 1..9: note = Description of Artificial Sequence: Synthetic peptide; note = XENP023224 vlCDR3
QQSNEDPFT

SEQ ID NO: 35767 - protein, 450 aa, synthetic construct
  source 1..450: note = Description of Artificial Sequence: Synthetic polypeptide; note = XENP023225 7G8_H3.71_L1.34_Fab-[CTLA-4]_H3.23_L0.129_scFv Fab-Fc Heavy Chain
EVQLVESGGGLVQPGGSLRLSCAASGFTFDDAWMSWVRQAPGKGLEWVAEISTKAYNHATYYAESVKGRFTISRDDSKSSVYLQMNSLRAEDTAVYYCTRLATWDWYFDVWGQGTTVTVSSASTKGPSVFPLAPSSKSTSGGTAALGCLVKDYFPEPVTVSWNSGALTSGVHTFPAVLQSSGLYSLSSVVTVPSSSLGTQTYICNVNHKPSDTKVDKKVEPKSCDKTHTCPPCPAPPVAGPSVFLFPPKPKDTLMISRTPEVTCVVVDVKHEDPEVKFNWYVDGVEVHNAKTKPREEEYNSTYRVVSVLTVLHQDWLNGKEYKCKVSNKALPAPIEKTISKAKGQPREPQVYTLPPSREEMTKNQVSLTCDVSGFYPSDIAVEWESDGQPENNYKTTPPVLDSDGSFFLYSKLTVDKSRWEQGDVFSCSVMHEALHNHYTQKSLSLSPGK

SEQ ID NO: 35768 - protein, 121 aa, synthetic construct; identical to SEQ ID NO: 35468
  source 1..121: note = Description of Artificial Sequence: Synthetic polypeptide; note = VH of XENP023225

SEQ ID NO: 35769 - protein, 5 aa, synthetic construct
  source 1..5: note = Description of Artificial Sequence: Synthetic peptide; note = XENP023225 vhCDR1
DAWMS

SEQ ID NO: 35770 - protein, 19 aa, synthetic construct
  source 1..19: note = Description of Artificial Sequence: Synthetic peptide; note = XENP023225 vhCDR2
EISTKAYNHATYYAESVKG

SEQ ID NO: 35771 - protein, 10 aa, synthetic construct
  source 1..10: note = Description of Artificial Sequence: Synthetic peptide; note = XENP023225 vhCDR3
LATWDWYFDV

SEQ ID NO: 35772 - protein, 477 aa, synthetic construct; identical to SEQ ID NO: 21669
  source 1..477: note = Description of Artificial Sequence: Synthetic polypeptide; note = XENP023225 7G8_H3.71_L1.34_Fab-[CTLA-4]_H3.23_L0.129_scFv scFv -Fc Heavy Chain

SEQ ID NO: 35773 - protein, 118 aa, synthetic construct; identical to SEQ ID NO: 2632
  source 1..118: note = Description of Artificial Sequence: Synthetic polypeptide; note = VH of XENP023225

SEQ ID NO: 35774 - protein, 108 aa, synthetic construct; identical to SEQ ID NO: 2768
  source 1..108: note = Description of Artificial Sequence: Synthetic polypeptide; note = VL of XENP023225

SEQ ID NO: 35775 - protein, 231 aa, synthetic construct; identical to SEQ ID NO: 21532
  source 1..231: note = Description of Artificial Sequence: Synthetic polypeptide; note = Fc chain of XENP023225

SEQ ID NO: 35776 - protein, 5 aa, synthetic construct
  source 1..5: note = Description of Artificial Sequence: Synthetic peptide; note = XENP023225 vhCDR1
SYTMH

SEQ ID NO: 35777 - protein, 17 aa, synthetic construct
  source 1..17: note = Description of Artificial Sequence: Synthetic peptide; note = XENP023225 vhCDR2
FISYDGNYKYYADSVKG

SEQ ID NO: 35778 - protein, 9 aa, synthetic construct
  source 1..9: note = Description of Artificial Sequence: Synthetic peptide; note = XENP023225 vhCDR3
GGHLGPFDL

SEQ ID NO: 35779 - protein, 12 aa, synthetic construct
  source 1..12: note = Description of Artificial Sequence: Synthetic peptide; note = XENP023225 vlCDR1
RASQSVGSSYLA

SEQ ID NO: 35780 - protein, 7 aa, synthetic construct
  source 1..7: note = Description of Artificial Sequence: Synthetic peptide; note = XENP023225 vlCDR2
GASSRAT

SEQ ID NO: 35781 - protein, 9 aa, synthetic construct
  source 1..9: note = Description of Artificial Sequence: Synthetic peptide; note = XENP023225 vlCDR3
QQYGSSPWT

SEQ ID NO: 35782 - protein, 218 aa, synthetic construct; identical to SEQ ID NO: 22599
  source 1..218: note = Description of Artificial Sequence: Synthetic polypeptide; note = XENP023225 7G8_H3.71_L1.34_Fab-[CTLA-4]_H3.23_L0.129_scFv Light Chain

SEQ ID NO: 35783 - protein, 111 aa, synthetic construct; identical to SEQ ID NO: 22600
  source 1..111: note = Description of Artificial Sequence: Synthetic polypeptide; note = VL of XENP023225

SEQ ID NO: 35784 - protein, 15 aa, synthetic construct
  source 1..15: note = Description of Artificial Sequence: Synthetic peptide; note = XENP023225 vlCDR1
RASQSVDYDGDSYMN

SEQ ID NO: 35785 - protein, 7 aa, synthetic construct
  source 1..7: note = Description of Artificial Sequence: Synthetic peptide; note = XENP023225 vlCDR2
AASELES

SEQ ID NO: 35786 - protein, 9 aa, synthetic construct
  source 1..9: note = Description of Artificial Sequence: Synthetic peptide; note = XENP023225 vlCDR3
QQSNEDPFT

SEQ ID NO: 35787 - protein, 450 aa, synthetic construct; identical to SEQ ID NO: 22484
  source 1..450: note = Description of Artificial Sequence: Synthetic polypeptide; note = XENP023226 7G8_H3.30_L1.39_Fab-[CTLA-4]_H3.23_L0.129_scFv Fab- Fc Heavy Chain

SEQ ID NO: 35788 - protein, 121 aa, synthetic construct; identical to SEQ ID NO: 22485
  source 1..121: note = Description of Artificial Sequence: Synthetic polypeptide; note = VH of XENP023226

SEQ ID NO: 35789 - protein, 5 aa, synthetic construct
  source 1..5: note = Description of Artificial Sequence: Synthetic peptide; note = XENP023226 vhCDR1
DAWMS

SEQ ID NO: 35790 - protein, 19 aa, synthetic construct
  source 1..19: note = Description of Artificial Sequence: Synthetic peptide; note = XENP023226 vhCDR2
EISTKANNHATYYAESVKG

SEQ ID NO: 35791 - protein, 10 aa, synthetic construct
  source 1..10: note = Description of Artificial Sequence: Synthetic peptide; note = XENP023226 vhCDR3
LATWDWYFDV

SEQ ID NO: 35792 - protein, 477 aa, synthetic construct; identical to SEQ ID NO: 21669
  source 1..477: note = Description of Artificial Sequence: Synthetic polypeptide; note = XENP023226 7G8_H3.30_L1.39_Fab-[CTLA-4]_H3.23_L0.129_scFv scFv -Fc Heavy Chain

SEQ ID NO: 35793 - protein, 118 aa, synthetic construct; identical to SEQ ID NO: 2632
  source 1..118: note = Description of Artificial Sequence: Synthetic polypeptide; note = VH of XENP023226

SEQ ID NO: 35794 - protein, 108 aa, synthetic construct; identical to SEQ ID NO: 2768
  source 1..108: note = Description of Artificial Sequence: Synthetic polypeptide; note = VL of XENP023226

SEQ ID NO: 35795 - protein, 231 aa, synthetic construct; identical to SEQ ID NO: 21532
  source 1..231: note = Description of Artificial Sequence: Synthetic polypeptide; note = Fc chain of XENP023226

SEQ ID NO: 35796 - protein, 5 aa, synthetic construct
  source 1..5: note = Description of Artificial Sequence: Synthetic peptide; note = XENP023226 vhCDR1
SYTMH

SEQ ID NO: 35797 - protein, 17 aa, synthetic construct
  source 1..17: note = Description of Artificial Sequence: Synthetic peptide; note = XENP023226 vhCDR2
FISYDGNYKYYADSVKG

SEQ ID NO: 35798 - protein, 9 aa, synthetic construct
  source 1..9: note = Description of Artificial Sequence: Synthetic peptide; note = XENP023226 vhCDR3
GGHLGPFDL

SEQ ID NO: 35799 - protein, 12 aa, synthetic construct
  source 1..12: note = Description of Artificial Sequence: Synthetic peptide; note = XENP023226 vlCDR1
RASQSVGSSYLA

SEQ ID NO: 35800 - protein, 7 aa, synthetic construct
  source 1..7: note = Description of Artificial Sequence: Synthetic peptide; note = XENP023226 vlCDR2
GASSRAT

SEQ ID NO: 35801 - protein, 9 aa, synthetic construct
  source 1..9: note = Description of Artificial Sequence: Synthetic peptide; note = XENP023226 vlCDR3
QQYGSSPWT

SEQ ID NO: 35802 - protein, 218 aa, synthetic construct; identical to SEQ ID NO: 35532
  source 1..218: note = Description of Artificial Sequence: Synthetic polypeptide; note = XENP023226 7G8_H3.30_L1.39_Fab-[CTLA-4]_H3.23_L0.129_scFv Light Chain

SEQ ID NO: 35803 - protein, 111 aa, synthetic construct; identical to SEQ ID NO: 35533
  source 1..111: note = Description of Artificial Sequence: Synthetic polypeptide; note = VL of XENP023226

SEQ ID NO: 35804 - protein, 15 aa, synthetic construct
  source 1..15: note = Description of Artificial Sequence: Synthetic peptide; note = XENP023226 vlCDR1
RASQSVDYYGDSYMN

SEQ ID NO: 35805 - protein, 7 aa, synthetic construct
  source 1..7: note = Description of Artificial Sequence: Synthetic peptide; note = XENP023226 vlCDR2
AASELES

SEQ ID NO: 35806 - protein, 9 aa, synthetic construct
  source 1..9: note = Description of Artificial Sequence: Synthetic peptide; note = XENP023226 vlCDR3
QQSNEDPFT

SEQ ID NO: 35807 - protein, 450 aa, synthetic construct; identical to SEQ ID NO: 35727
  source 1..450: note = Description of Artificial Sequence: Synthetic polypeptide; note = XENP023227 7G8_H3.66_L1.39_Fab-[CTLA-4]_H3.23_L0.129_scFv Fab -Fc Heavy Chain

SEQ ID NO: 35808 - protein, 121 aa, synthetic construct; identical to SEQ ID NO: 35418
  source 1..121: note = Description of Artificial Sequence: Synthetic polypeptide; note = VH of XENP023227

SEQ ID NO: 35809 - protein, 5 aa, synthetic construct
  source 1..5: note = Description of Artificial Sequence: Synthetic peptide; note = XENP023227 vhCDR1
EAWMS

SEQ ID NO: 35810 - protein, 19 aa, synthetic construct
  source 1..19: note = Description of Artificial Sequence: Synthetic peptide; note = XENP023227 vhCDR2
EISTKANNHATYYAESVKG

SEQ ID NO: 35811 - protein, 10 aa, synthetic construct
  source 1..10: note = Description of Artificial Sequence: Synthetic peptide; note = XENP023227 vhCDR3
LATWDWYFDV

SEQ ID NO: 35812 - protein, 477 aa, synthetic construct; identical to SEQ ID NO: 21669
  source 1..477: note = Description of Artificial Sequence: Synthetic polypeptide; note = XENP023227 7G8_H3.66_L1.39_Fab-[CTLA-4]_H3.23_L0.129_scFv scFv -Fc Heavy Chain

SEQ ID NO: 35813 - protein, 118 aa, synthetic construct; identical to SEQ ID NO: 2632
  source 1..118: note = Description of Artificial Sequence: Synthetic polypeptide; note = VH of XENP023227

SEQ ID NO: 35814 - protein, 108 aa, synthetic construct; identical to SEQ ID NO: 2768
  source 1..108: note = Description of Artificial Sequence: Synthetic polypeptide; note = VL of XENP023227

SEQ ID NO: 35815 - protein, 231 aa, synthetic construct; identical to SEQ ID NO: 21532
  source 1..231: note = Description of Artificial Sequence: Synthetic polypeptide; note = Fc chain of XENP023227

SEQ ID NO: 35816 - protein, 5 aa, synthetic construct
  source 1..5: note = Description of Artificial Sequence: Synthetic peptide; note = XENP023227 vhCDR1
SYTMH

SEQ ID NO: 35817 - protein, 17 aa, synthetic construct
  source 1..17: note = Description of Artificial Sequence: Synthetic peptide; note = XENP023227 vhCDR2
FISYDGNYKYYADSVKG

SEQ ID NO: 35818 - protein, 9 aa, synthetic construct
  source 1..9: note = Description of Artificial Sequence: Synthetic peptide; note = XENP023227 vhCDR3
GGHLGPFDL

SEQ ID NO: 35819 - protein, 12 aa, synthetic construct
  source 1..12: note = Description of Artificial Sequence: Synthetic peptide; note = XENP023227 vlCDR1
RASQSVGSSYLA

SEQ ID NO: 35820 - protein, 7 aa, synthetic construct
  source 1..7: note = Description of Artificial Sequence: Synthetic peptide; note = XENP023227 vlCDR2
GASSRAT

SEQ ID NO: 35821 - protein, 9 aa, synthetic construct
  source 1..9: note = Description of Artificial Sequence: Synthetic peptide; note = XENP023227 vlCDR3
QQYGSSPWT

SEQ ID NO: 35822 - protein, 218 aa, synthetic construct; identical to SEQ ID NO: 35532
  source 1..218: note = Description of Artificial Sequence: Synthetic polypeptide; note = XENP023227 7G8_H3.66_L1.39_Fab-[CTLA-4]_H3.23_L0.129_scFv  Light Chain

SEQ ID NO: 35823 - protein, 111 aa, synthetic construct; identical to SEQ ID NO: 35533
  source 1..111: note = Description of Artificial Sequence: Synthetic polypeptide; note = VL of XENP023227

SEQ ID NO: 35824 - protein, 15 aa, synthetic construct
  source 1..15: note = Description of Artificial Sequence: Synthetic peptide; note = XENP023227 vlCDR1
RASQSVDYYGDSYMN

SEQ ID NO: 35825 - protein, 7 aa, synthetic construct
  source 1..7: note = Description of Artificial Sequence: Synthetic peptide; note = XENP023227 vlCDR2
AASELES

SEQ ID NO: 35826 - protein, 9 aa, synthetic construct
  source 1..9: note = Description of Artificial Sequence: Synthetic peptide; note = XENP023227 vlCDR3
QQSNEDPFT

SEQ ID NO: 35827 - protein, 450 aa, synthetic construct; identical to SEQ ID NO: 35747
  source 1..450: note = Description of Artificial Sequence: Synthetic polypeptide; note = XENP023228 7G8_H3.67_L1.39_Fab-[CTLA-4]_H3.23_L0.129_scFv Fab- Fc Heavy Chain

SEQ ID NO: 35828 - protein, 121 aa, synthetic construct; identical to SEQ ID NO: 35428
  source 1..121: note = Description of Artificial Sequence: Synthetic polypeptide; note = VH of XENP023228

SEQ ID NO: 35829 - protein, 5 aa, synthetic construct
  source 1..5: note = Description of Artificial Sequence: Synthetic peptide; note = XENP023228 vhCDR1
DTWMS

SEQ ID NO: 35830 - protein, 19 aa, synthetic construct
  source 1..19: note = Description of Artificial Sequence: Synthetic peptide; note = XENP023228 vhCDR2
EISTKANNHATYYAESVKG

SEQ ID NO: 35831 - protein, 10 aa, synthetic construct
  source 1..10: note = Description of Artificial Sequence: Synthetic peptide; note = XENP023228 vhCDR3
LATWDWYFDV

SEQ ID NO: 35832 - protein, 477 aa, synthetic construct; identical to SEQ ID NO: 21669
  source 1..477: note = Description of Artificial Sequence: Synthetic polypeptide; note = XENP023228 7G8_H3.67_L1.39_Fab-[CTLA-4]_H3.23_L0.129_scFv scFv -Fc Heavy Chain

SEQ ID NO: 35833 - protein, 118 aa, synthetic construct; identical to SEQ ID NO: 2632
  source 1..118: note = Description of Artificial Sequence: Synthetic polypeptide; note = VH of XENP023228

SEQ ID NO: 35834 - protein, 108 aa, synthetic construct; identical to SEQ ID NO: 2768
  source 1..108: note = Description of Artificial Sequence: Synthetic polypeptide; note = VL of XENP023228

SEQ ID NO: 35835 - protein, 231 aa, synthetic construct; identical to SEQ ID NO: 21532
  source 1..231: note = Description of Artificial Sequence: Synthetic polypeptide; note = Fc chain of XENP023228

SEQ ID NO: 35836 - protein, 5 aa, synthetic construct
  source 1..5: note = Description of Artificial Sequence: Synthetic peptide; note = XENP023228 vhCDR1
SYTMH

SEQ ID NO: 35837 - protein, 17 aa, synthetic construct
  source 1..17: note = Description of Artificial Sequence: Synthetic peptide; note = XENP023228 vhCDR2
FISYDGNYKYYADSVKG

SEQ ID NO: 35838 - protein, 9 aa, synthetic construct
  source 1..9: note = Description of Artificial Sequence: Synthetic peptide; note = XENP023228 vhCDR3
GGHLGPFDL

SEQ ID NO: 35839 - protein, 12 aa, synthetic construct
  source 1..12: note = Description of Artificial Sequence: Synthetic peptide; note = XENP023228 vlCDR1
RASQSVGSSYLA

SEQ ID NO: 35840 - protein, 7 aa, synthetic construct
  source 1..7: note = Description of Artificial Sequence: Synthetic peptide; note = XENP023228 vlCDR2
GASSRAT

SEQ ID NO: 35841 - protein, 9 aa, synthetic construct
  source 1..9: note = Description of Artificial Sequence: Synthetic peptide; note = XENP023228 vlCDR3
QQYGSSPWT

SEQ ID NO: 35842 - protein, 218 aa, synthetic construct; identical to SEQ ID NO: 35532
  source 1..218: note = Description of Artificial Sequence: Synthetic polypeptide; note = XENP023228 7G8_H3.67_L1.39_Fab-[CTLA-4]_H3.23_L0.129_scFv  Light Chain

SEQ ID NO: 35843 - protein, 111 aa, synthetic construct; identical to SEQ ID NO: 35533
  source 1..111: note = Description of Artificial Sequence: Synthetic polypeptide; note = VL of XENP023228

SEQ ID NO: 35844 - protein, 15 aa, synthetic construct
  source 1..15: note = Description of Artificial Sequence: Synthetic peptide; note = XENP023228 vlCDR1
RASQSVDYYGDSYMN

SEQ ID NO: 35845 - protein, 7 aa, synthetic construct
  source 1..7: note = Description of Artificial Sequence: Synthetic peptide; note = XENP023228 vlCDR2
AASELES

SEQ ID NO: 35846 - protein, 9 aa, synthetic construct
  source 1..9: note = Description of Artificial Sequence: Synthetic peptide; note = XENP023228 vlCDR3
QQSNEDPFT

SEQ ID NO: 35847 - protein, 450 aa, synthetic construct; identical to SEQ ID NO: 35767
  source 1..450: note = Description of Artificial Sequence: Synthetic polypeptide; note = XENP023229 7G8_H3.71_L1.39_Fab-[CTLA-4]_H3.23_L0.129_scFv Fab -Fc Heavy Chain

SEQ ID NO: 35848 - protein, 121 aa, synthetic construct; identical to SEQ ID NO: 35468
  source 1..121: note = Description of Artificial Sequence: Synthetic polypeptide; note = VH of XENP023229

SEQ ID NO: 35849 - protein, 5 aa, synthetic construct
  source 1..5: note = Description of Artificial Sequence: Synthetic peptide; note = XENP023229 vhCDR1
DAWMS

SEQ ID NO: 35850 - protein, 19 aa, synthetic construct
  source 1..19: note = Description of Artificial Sequence: Synthetic peptide; note = XENP023229 vhCDR2
EISTKAYNHATYYAESVKG

SEQ ID NO: 35851 - protein, 10 aa, synthetic construct
  source 1..10: note = Description of Artificial Sequence: Synthetic peptide; note = XENP023229 vhCDR3
LATWDWYFDV

SEQ ID NO: 35852 - protein, 477 aa, synthetic construct; identical to SEQ ID NO: 21669
  source 1..477: note = Description of Artificial Sequence: Synthetic polypeptide; note = XENP023229 7G8_H3.71_L1.39_Fab-[CTLA-4]_H3.23_L0.129_scFv scFv -Fc Heavy Chain

SEQ ID NO: 35853 - protein, 118 aa, synthetic construct; identical to SEQ ID NO: 2632
  source 1..118: note = Description of Artificial Sequence: Synthetic polypeptide; note = VH of XENP023229

SEQ ID NO: 35854 - protein, 108 aa, synthetic construct; identical to SEQ ID NO: 2768
  source 1..108: note = Description of Artificial Sequence: Synthetic polypeptide; note = VL of XENP023229

SEQ ID NO: 35855 - protein, 231 aa, synthetic construct; identical to SEQ ID NO: 21532
  source 1..231: note = Description of Artificial Sequence: Synthetic polypeptide; note = Fc chain of XENP023229

SEQ ID NO: 35856 - protein, 5 aa, synthetic construct
  source 1..5: note = Description of Artificial Sequence: Synthetic peptide; note = XENP023229 vhCDR1
SYTMH

SEQ ID NO: 35857 - protein, 17 aa, synthetic construct
  source 1..17: note = Description of Artificial Sequence: Synthetic peptide; note = XENP023229 vhCDR2
FISYDGNYKYYADSVKG

SEQ ID NO: 35858 - protein, 9 aa, synthetic construct
  source 1..9: note = Description of Artificial Sequence: Synthetic peptide; note = XENP023229 vhCDR3
GGHLGPFDL

SEQ ID NO: 35859 - protein, 12 aa, synthetic construct
  source 1..12: note = Description of Artificial Sequence: Synthetic peptide; note = XENP023229 vlCDR1
RASQSVGSSYLA

SEQ ID NO: 35860 - protein, 7 aa, synthetic construct
  source 1..7: note = Description of Artificial Sequence: Synthetic peptide; note = XENP023229 vlCDR2
GASSRAT

SEQ ID NO: 35861 - protein, 9 aa, synthetic construct
  source 1..9: note = Description of Artificial Sequence: Synthetic peptide; note = XENP023229 vlCDR3
QQYGSSPWT

SEQ ID NO: 35862 - protein, 218 aa, synthetic construct; identical to SEQ ID NO: 35532
  source 1..218: note = Description of Artificial Sequence: Synthetic polypeptide; note = XENP023229 7G8_H3.71_L1.39_Fab-[CTLA-4]_H3.23_L0.129_scFv  Light Chain

SEQ ID NO: 35863 - protein, 111 aa, synthetic construct; identical to SEQ ID NO: 35533
  source 1..111: note = Description of Artificial Sequence: Synthetic polypeptide; note = VL of XENP023229

SEQ ID NO: 35864 - protein, 15 aa, synthetic construct
  source 1..15: note = Description of Artificial Sequence: Synthetic peptide; note = XENP023229 vlCDR1
RASQSVDYYGDSYMN

SEQ ID NO: 35865 - protein, 7 aa, synthetic construct
  source 1..7: note = Description of Artificial Sequence: Synthetic peptide; note = XENP023229 vlCDR2
AASELES

SEQ ID NO: 35866 - protein, 9 aa, synthetic construct
  source 1..9: note = Description of Artificial Sequence: Synthetic peptide; note = XENP023229 vlCDR3
QQSNEDPFT

SEQ ID NO: 35867 - protein, 447 aa, synthetic construct; identical to SEQ ID NO: 22084
  source 1..447: note = Description of Artificial Sequence: Synthetic polypeptide; note = XENP022718 2A11_H1.144_L2_Fab-1G6_L1.194_H1.279_scFv Fab-Fc  Heavy Chain

SEQ ID NO: 35868 - protein, 118 aa, synthetic construct; identical to SEQ ID NO: 22085
  source 1..118: note = Description of Artificial Sequence: Synthetic polypeptide; note = VH of XENP022718

SEQ ID NO: 35869 - protein, 5 aa, synthetic construct
  source 1..5: note = Description of Artificial Sequence: Synthetic peptide; note = XENP022718 vhCDR1
DYFMH

SEQ ID NO: 35870 - protein, 17 aa, synthetic construct
  source 1..17: note = Description of Artificial Sequence: Synthetic peptide; note = XENP022718 vhCDR2
WIDPELGDTEYAPKFQG

SEQ ID NO: 35871 - protein, 9 aa, synthetic construct
  source 1..9: note = Description of Artificial Sequence: Synthetic peptide; note = XENP022718 vhCDR3
RGVYQALDY

SEQ ID NO: 35872 - protein, 480 aa, synthetic construct; identical to SEQ ID NO: 23221
  source 1..480: note = Description of Artificial Sequence: Synthetic polypeptide; note = XENP022718 2A11_H1.144_L2_Fab-1G6_L1.194_H1.279_scFv scFv-Fc  Heavy Chain

SEQ ID NO: 35873 - protein, 107 aa, synthetic construct; identical to SEQ ID NO: 10999
  source 1..107: note = Description of Artificial Sequence: Synthetic polypeptide; note = VH of XENP022718

SEQ ID NO: 35874 - protein, 122 aa, synthetic construct; identical to SEQ ID NO: 10908
  source 1..122: note = Description of Artificial Sequence: Synthetic polypeptide; note = VL of XENP022718

SEQ ID NO: 35875 - protein, 231 aa, synthetic construct; identical to SEQ ID NO: 21532
  source 1..231: note = Description of Artificial Sequence: Synthetic polypeptide; note = Fc chain of XENP022718

SEQ ID NO: 35876 - protein, 11 aa, synthetic construct
  source 1..11: note = Description of Artificial Sequence: Synthetic peptide; note = XENP022718 vhCDR1
RASQSVGNDVA

SEQ ID NO: 35877 - protein, 7 aa, synthetic construct
  source 1..7: note = Description of Artificial Sequence: Synthetic peptide; note = XENP022718 vhCDR2
YASHRYT

SEQ ID NO: 35878 - protein, 9 aa, synthetic construct
  source 1..9: note = Description of Artificial Sequence: Synthetic peptide; note = XENP022718 vhCDR3
QQDFSSPRT

SEQ ID NO: 35879 - protein, 5 aa, synthetic construct
  source 1..5: note = Description of Artificial Sequence: Synthetic peptide; note = XENP022718 vlCDR1
NYWMN

SEQ ID NO: 35880 - protein, 19 aa, synthetic construct
  source 1..19: note = Description of Artificial Sequence: Synthetic peptide; note = XENP022718 vlCDR2
EIRLYSNNYATHYAESVKG

SEQ ID NO: 35881 - protein, 11 aa, synthetic construct
  source 1..11: note = Description of Artificial Sequence: Synthetic peptide; note = XENP022718 vlCDR3
YYGNYGGYFDV

SEQ ID NO: 35882 - protein, 214 aa, synthetic construct; identical to SEQ ID NO: 17250
  source 1..214: note = Description of Artificial Sequence: Synthetic polypeptide; note = XENP022718 2A11_H1.144_L2_Fab-1G6_L1.194_H1.279_scFv Light  Chain

SEQ ID NO: 35883 - protein, 107 aa, synthetic construct; identical to SEQ ID NO: 17251
  source 1..107: note = Description of Artificial Sequence: Synthetic polypeptide; note = VL of XENP022718

SEQ ID NO: 35884 - protein, 11 aa, synthetic construct
  source 1..11: note = Description of Artificial Sequence: Synthetic peptide; note = XENP022718 vlCDR1
QASQDIGNYLN

SEQ ID NO: 35885 - protein, 7 aa, synthetic construct
  source 1..7: note = Description of Artificial Sequence: Synthetic peptide; note = XENP022718 vlCDR2
YTSRLHS

SEQ ID NO: 35886 - protein, 9 aa, synthetic construct
  source 1..9: note = Description of Artificial Sequence: Synthetic peptide; note = XENP022718 vlCDR3
QQGNTLPYT

SEQ ID NO: 35887 - protein, 447 aa, synthetic construct; identical to SEQ ID NO: 17235
  source 1..447: note = Description of Artificial Sequence: Synthetic polypeptide; note = XENP022719 2A11_H1_L2.50_Fab-1G6_L1.194_H1.279_scFv Fab-Fc  Heavy Chain

SEQ ID NO: 35888 - protein, 118 aa, synthetic construct; identical to SEQ ID NO: 17236
  source 1..118: note = Description of Artificial Sequence: Synthetic polypeptide; note = VH of XENP022719

SEQ ID NO: 35889 - protein, 5 aa, synthetic construct
  source 1..5: note = Description of Artificial Sequence: Synthetic peptide; note = XENP022719 vhCDR1
DYYMH

SEQ ID NO: 35890 - protein, 17 aa, synthetic construct
  source 1..17: note = Description of Artificial Sequence: Synthetic peptide; note = XENP022719 vhCDR2
WIDPENGDTEYAPKFQG

SEQ ID NO: 35891 - protein, 9 aa, synthetic construct
  source 1..9: note = Description of Artificial Sequence: Synthetic peptide; note = XENP022719 vhCDR3
RGVRQALDY

SEQ ID NO: 35892 - protein, 480 aa, synthetic construct; identical to SEQ ID NO: 23221
  source 1..480: note = Description of Artificial Sequence: Synthetic polypeptide; note = XENP022719 2A11_H1_L2.50_Fab-1G6_L1.194_H1.279_scFv scFv-Fc  Heavy Chain

SEQ ID NO: 35893 - protein, 107 aa, synthetic construct; identical to SEQ ID NO: 10999
  source 1..107: note = Description of Artificial Sequence: Synthetic polypeptide; note = VH of XENP022719

SEQ ID NO: 35894 - protein, 122 aa, synthetic construct; identical to SEQ ID NO: 10908
  source 1..122: note = Description of Artificial Sequence: Synthetic polypeptide; note = VL of XENP022719

SEQ ID NO: 35895 - protein, 231 aa, synthetic construct; identical to SEQ ID NO: 21532
  source 1..231: note = Description of Artificial Sequence: Synthetic polypeptide; note = Fc chain of XENP022719

SEQ ID NO: 35896 - protein, 11 aa, synthetic construct
  source 1..11: note = Description of Artificial Sequence: Synthetic peptide; note = XENP022719 vhCDR1
RASQSVGNDVA

SEQ ID NO: 35897 - protein, 7 aa, synthetic construct
  source 1..7: note = Description of Artificial Sequence: Synthetic peptide; note = XENP022719 vhCDR2
YASHRYT

SEQ ID NO: 35898 - protein, 9 aa, synthetic construct
  source 1..9: note = Description of Artificial Sequence: Synthetic peptide; note = XENP022719 vhCDR3
QQDFSSPRT

SEQ ID NO: 35899 - protein, 5 aa, synthetic construct
  source 1..5: note = Description of Artificial Sequence: Synthetic peptide; note = XENP022719 vlCDR1
NYWMN

SEQ ID NO: 35900 - protein, 19 aa, synthetic construct
  source 1..19: note = Description of Artificial Sequence: Synthetic peptide; note = XENP022719 vlCDR2
EIRLYSNNYATHYAESVKG

SEQ ID NO: 35901 - protein, 11 aa, synthetic construct
  source 1..11: note = Description of Artificial Sequence: Synthetic peptide; note = XENP022719 vlCDR3
YYGNYGGYFDV

SEQ ID NO: 35902 - protein, 214 aa, synthetic construct; identical to SEQ ID NO: 22059
  source 1..214: note = Description of Artificial Sequence: Synthetic polypeptide; note = XENP022719 2A11_H1_L2.50_Fab-1G6_L1.194_H1.279_scFv Light  Chain

SEQ ID NO: 35903 - protein, 107 aa, synthetic construct; identical to SEQ ID NO: 22060
  source 1..107: note = Description of Artificial Sequence: Synthetic polypeptide; note = VL of XENP022719

SEQ ID NO: 35904 - protein, 11 aa, synthetic construct
  source 1..11: note = Description of Artificial Sequence: Synthetic peptide; note = XENP022719 vlCDR1
QASQDIGNYLN

SEQ ID NO: 35905 - protein, 7 aa, synthetic construct
  source 1..7: note = Description of Artificial Sequence: Synthetic peptide; note = XENP022719 vlCDR2
YTSYLHS

SEQ ID NO: 35906 - protein, 9 aa, synthetic construct
  source 1..9: note = Description of Artificial Sequence: Synthetic peptide; note = XENP022719 vlCDR3
QQGNTLPYT

SEQ ID NO: 35907 - protein, 447 aa, synthetic construct; identical to SEQ ID NO: 17235
  source 1..447: note = Description of Artificial Sequence: Synthetic polypeptide; note = XENP022720 2A11_H1_L2.113_Fab-1G6_L1.194_H1.279_scFv Fab-Fc  Heavy Chain

SEQ ID NO: 35908 - protein, 118 aa, synthetic construct; identical to SEQ ID NO: 17236
  source 1..118: note = Description of Artificial Sequence: Synthetic polypeptide; note = VH of XENP022720

SEQ ID NO: 35909 - protein, 5 aa, synthetic construct
  source 1..5: note = Description of Artificial Sequence: Synthetic peptide; note = XENP022720 vhCDR1
DYYMH

SEQ ID NO: 35910 - protein, 17 aa, synthetic construct
  source 1..17: note = Description of Artificial Sequence: Synthetic peptide; note = XENP022720 vhCDR2
WIDPENGDTEYAPKFQG

SEQ ID NO: 35911 - protein, 9 aa, synthetic construct
  source 1..9: note = Description of Artificial Sequence: Synthetic peptide; note = XENP022720 vhCDR3
RGVRQALDY

SEQ ID NO: 35912 - protein, 480 aa, synthetic construct; identical to SEQ ID NO: 23221
  source 1..480: note = Description of Artificial Sequence: Synthetic polypeptide; note = XENP022720 2A11_H1_L2.113_Fab-1G6_L1.194_H1.279_scFv scFv-Fc  Heavy Chain

SEQ ID NO: 35913 - protein, 107 aa, synthetic construct; identical to SEQ ID NO: 10999
  source 1..107: note = Description of Artificial Sequence: Synthetic polypeptide; note = VH of XENP022720

SEQ ID NO: 35914 - protein, 122 aa, synthetic construct; identical to SEQ ID NO: 10908
  source 1..122: note = Description of Artificial Sequence: Synthetic polypeptide; note = VL of XENP022720

SEQ ID NO: 35915 - protein, 231 aa, synthetic construct; identical to SEQ ID NO: 21532
  source 1..231: note = Description of Artificial Sequence: Synthetic polypeptide; note = Fc chain of XENP022720

SEQ ID NO: 35916 - protein, 11 aa, synthetic construct
  source 1..11: note = Description of Artificial Sequence: Synthetic peptide; note = XENP022720 vhCDR1
RASQSVGNDVA

SEQ ID NO: 35917 - protein, 7 aa, synthetic construct
  source 1..7: note = Description of Artificial Sequence: Synthetic peptide; note = XENP022720 vhCDR2
YASHRYT

SEQ ID NO: 35918 - protein, 9 aa, synthetic construct
  source 1..9: note = Description of Artificial Sequence: Synthetic peptide; note = XENP022720 vhCDR3
QQDFSSPRT

SEQ ID NO: 35919 - protein, 5 aa, synthetic construct
  source 1..5: note = Description of Artificial Sequence: Synthetic peptide; note = XENP022720 vlCDR1
NYWMN

SEQ ID NO: 35920 - protein, 19 aa, synthetic construct
  source 1..19: note = Description of Artificial Sequence: Synthetic peptide; note = XENP022720 vlCDR2
EIRLYSNNYATHYAESVKG

SEQ ID NO: 35921 - protein, 11 aa, synthetic construct
  source 1..11: note = Description of Artificial Sequence: Synthetic peptide; note = XENP022720 vlCDR3
YYGNYGGYFDV

SEQ ID NO: 35922 - protein, 214 aa, synthetic construct; identical to SEQ ID NO: 22079
  source 1..214: note = Description of Artificial Sequence: Synthetic polypeptide; note = XENP022720 2A11_H1_L2.113_Fab-1G6_L1.194_H1.279_scFv Light  Chain

SEQ ID NO: 35923 - protein, 107 aa, synthetic construct; identical to SEQ ID NO: 22080
  source 1..107: note = Description of Artificial Sequence: Synthetic polypeptide; note = VL of XENP022720

SEQ ID NO: 35924 - protein, 11 aa, synthetic construct
  source 1..11: note = Description of Artificial Sequence: Synthetic peptide; note = XENP022720 vlCDR1
QASQDIGNYLN

SEQ ID NO: 35925 - protein, 7 aa, synthetic construct
  source 1..7: note = Description of Artificial Sequence: Synthetic peptide; note = XENP022720 vlCDR2
FTSYLHS

SEQ ID NO: 35926 - protein, 9 aa, synthetic construct
  source 1..9: note = Description of Artificial Sequence: Synthetic peptide; note = XENP022720 vlCDR3
QQGNTLPYT

SEQ ID NO: 35927 - protein, 450 aa, synthetic construct; identical to SEQ ID NO: 35607
  source 1..450: note = Description of Artificial Sequence: Synthetic polypeptide; note = XENP022847 7G8_H3.30_L1.34_Fab-1G6_L1.194_H1.279_scFv Fab-Fc  Heavy Chain

SEQ ID NO: 35928 - protein, 121 aa, synthetic construct; identical to SEQ ID NO: 22485
  source 1..121: note = Description of Artificial Sequence: Synthetic polypeptide; note = VH of XENP022847

SEQ ID NO: 35929 - protein, 5 aa, synthetic construct
  source 1..5: note = Description of Artificial Sequence: Synthetic peptide; note = XENP022847 vhCDR1
DAWMS

SEQ ID NO: 35930 - protein, 19 aa, synthetic construct
  source 1..19: note = Description of Artificial Sequence: Synthetic peptide; note = XENP022847 vhCDR2
EISTKANNHATYYAESVKG

SEQ ID NO: 35931 - protein, 10 aa, synthetic construct
  source 1..10: note = Description of Artificial Sequence: Synthetic peptide; note = XENP022847 vhCDR3
LATWDWYFDV

SEQ ID NO: 35932 - protein, 480 aa, synthetic construct; identical to SEQ ID NO: 23581
  source 1..480: note = Description of Artificial Sequence: Synthetic polypeptide; note = XENP022847 7G8_H3.30_L1.34_Fab-1G6_L1.194_H1.279_scFv scFv-Fc  Heavy Chain

SEQ ID NO: 35933 - protein, 107 aa, synthetic construct; identical to SEQ ID NO: 10999
  source 1..107: note = Description of Artificial Sequence: Synthetic polypeptide; note = VH of XENP022847

SEQ ID NO: 35934 - protein, 122 aa, synthetic construct; identical to SEQ ID NO: 10908
  source 1..122: note = Description of Artificial Sequence: Synthetic polypeptide; note = VL of XENP022847

SEQ ID NO: 35935 - protein, 231 aa, synthetic construct; identical to SEQ ID NO: 21572
  source 1..231: note = Description of Artificial Sequence: Synthetic polypeptide; note = Fc chain of XENP022847

SEQ ID NO: 35936 - protein, 11 aa, synthetic construct
  source 1..11: note = Description of Artificial Sequence: Synthetic peptide; note = XENP022847 vhCDR1
RASQSVGNDVA

SEQ ID NO: 35937 - protein, 7 aa, synthetic construct
  source 1..7: note = Description of Artificial Sequence: Synthetic peptide; note = XENP022847 vhCDR2
YASHRYT

SEQ ID NO: 35938 - protein, 9 aa, synthetic construct
  source 1..9: note = Description of Artificial Sequence: Synthetic peptide; note = XENP022847 vhCDR3
QQDFSSPRT

SEQ ID NO: 35939 - protein, 5 aa, synthetic construct
  source 1..5: note = Description of Artificial Sequence: Synthetic peptide; note = XENP022847 vlCDR1
NYWMN

SEQ ID NO: 35940 - protein, 19 aa, synthetic construct
  source 1..19: note = Description of Artificial Sequence: Synthetic peptide; note = XENP022847 vlCDR2
EIRLYSNNYATHYAESVKG

SEQ ID NO: 35941 - protein, 11 aa, synthetic construct
  source 1..11: note = Description of Artificial Sequence: Synthetic peptide; note = XENP022847 vlCDR3
YYGNYGGYFDV

SEQ ID NO: 35942 - protein, 218 aa, synthetic construct; identical to SEQ ID NO: 22599
  source 1..218: note = Description of Artificial Sequence: Synthetic polypeptide; note = XENP022847 7G8_H3.30_L1.34_Fab-1G6_L1.194_H1.279_scFv Light  Chain

SEQ ID NO: 35943 - protein, 111 aa, synthetic construct; identical to SEQ ID NO: 22600
  source 1..111: note = Description of Artificial Sequence: Synthetic polypeptide; note = VL of XENP022847

SEQ ID NO: 35944 - protein, 15 aa, synthetic construct
  source 1..15: note = Description of Artificial Sequence: Synthetic peptide; note = XENP022847 vlCDR1
RASQSVDYDGDSYMN

SEQ ID NO: 35945 - protein, 7 aa, synthetic construct
  source 1..7: note = Description of Artificial Sequence: Synthetic peptide; note = XENP022847 vlCDR2
AASELES

SEQ ID NO: 35946 - protein, 9 aa, synthetic construct
  source 1..9: note = Description of Artificial Sequence: Synthetic peptide; note = XENP022847 vlCDR3
QQSNEDPFT

SEQ ID NO: 35947 - protein, 450 aa, synthetic construct; identical to SEQ ID NO: 35607
  source 1..450: note = Description of Artificial Sequence: Synthetic polypeptide; note = XENP022848 7G8_H3.30_L1.36_Fab-1G6_L1.194_H1.279_scFv Fab-Fc  Heavy Chain

SEQ ID NO: 35948 - protein, 121 aa, synthetic construct; identical to SEQ ID NO: 22485
  source 1..121: note = Description of Artificial Sequence: Synthetic polypeptide; note = VH of XENP022848

SEQ ID NO: 35949 - protein, 5 aa, synthetic construct
  source 1..5: note = Description of Artificial Sequence: Synthetic peptide; note = XENP022848 vhCDR1
DAWMS

SEQ ID NO: 35950 - protein, 19 aa, synthetic construct
  source 1..19: note = Description of Artificial Sequence: Synthetic peptide; note = XENP022848 vhCDR2
EISTKANNHATYYAESVKG

SEQ ID NO: 35951 - protein, 10 aa, synthetic construct
  source 1..10: note = Description of Artificial Sequence: Synthetic peptide; note = XENP022848 vhCDR3
LATWDWYFDV

SEQ ID NO: 35952 - protein, 480 aa, synthetic construct; identical to SEQ ID NO: 23581
  source 1..480: note = Description of Artificial Sequence: Synthetic polypeptide; note = XENP022848 7G8_H3.30_L1.36_Fab-1G6_L1.194_H1.279_scFv scFv-Fc Heavy Chain

SEQ ID NO: 35953 - protein, 107 aa, synthetic construct; identical to SEQ ID NO: 10999
  source 1..107: note = Description of Artificial Sequence: Synthetic polypeptide; note = VH of XENP022848

SEQ ID NO: 35954 - protein, 122 aa, synthetic construct; identical to SEQ ID NO: 10908
  source 1..122: note = Description of Artificial Sequence: Synthetic polypeptide; note = VL of XENP022848

SEQ ID NO: 35955 - protein, 231 aa, synthetic construct; identical to SEQ ID NO: 21572
  source 1..231: note = Description of Artificial Sequence: Synthetic polypeptide; note = Fc chain of XENP022848

SEQ ID NO: 35956 - protein, 11 aa, synthetic construct
  source 1..11: note = Description of Artificial Sequence: Synthetic peptide; note = XENP022848 vhCDR1
RASQSVGNDVA

SEQ ID NO: 35957 - protein, 7 aa, synthetic construct
  source 1..7: note = Description of Artificial Sequence: Synthetic peptide; note = XENP022848 vhCDR2
YASHRYT

SEQ ID NO: 35958 - protein, 9 aa, synthetic construct
  source 1..9: note = Description of Artificial Sequence: Synthetic peptide; note = XENP022848 vhCDR3
QQDFSSPRT

SEQ ID NO: 35959 - protein, 5 aa, synthetic construct
  source 1..5: note = Description of Artificial Sequence: Synthetic peptide; note = XENP022848 vlCDR1
NYWMN

SEQ ID NO: 35960 - protein, 19 aa, synthetic construct
  source 1..19: note = Description of Artificial Sequence: Synthetic peptide; note = XENP022848 vlCDR2
EIRLYSNNYATHYAESVKG

SEQ ID NO: 35961 - protein, 11 aa, synthetic construct
  source 1..11: note = Description of Artificial Sequence: Synthetic peptide; note = XENP022848 vlCDR3
YYGNYGGYFDV

SEQ ID NO: 35962 - protein, 218 aa, synthetic construct; identical to SEQ ID NO: 22619
  source 1..218: note = Description of Artificial Sequence: Synthetic polypeptide; note = XENP022848 7G8_H3.30_L1.36_Fab-1G6_L1.194_H1.279_scFv Light  Chain

SEQ ID NO: 35963 - protein, 111 aa, synthetic construct; identical to SEQ ID NO: 22620
  source 1..111: note = Description of Artificial Sequence: Synthetic polypeptide; note = VL of XENP022848

SEQ ID NO: 35964 - protein, 15 aa, synthetic construct
  source 1..15: note = Description of Artificial Sequence: Synthetic peptide; note = XENP022848 vlCDR1
RASQSVDHDGDSYMN

SEQ ID NO: 35965 - protein, 7 aa, synthetic construct
  source 1..7: note = Description of Artificial Sequence: Synthetic peptide; note = XENP022848 vlCDR2
AASELES

SEQ ID NO: 35966 - protein, 9 aa, synthetic construct
  source 1..9: note = Description of Artificial Sequence: Synthetic peptide; note = XENP022848 vlCDR3
QQSNEDPFT

SEQ ID NO: 35967 - protein, 447 aa, synthetic construct; identical to SEQ ID NO: 35647
  source 1..447: note = Description of Artificial Sequence: Synthetic polypeptide; note = XENP022849 2A11_H1.144_L2.142_Fab-1G6_L1.194_H1.279_scFv Fab-Fc Heavy Chain

SEQ ID NO: 35968 - protein, 118 aa, synthetic construct; identical to SEQ ID NO: 22085
  source 1..118: note = Description of Artificial Sequence: Synthetic polypeptide; note = VH of XENP022849

SEQ ID NO: 35969 - protein, 5 aa, synthetic construct
  source 1..5: note = Description of Artificial Sequence: Synthetic peptide; note = XENP022849 vhCDR1
DYFMH

SEQ ID NO: 35970 - protein, 17 aa, synthetic construct
  source 1..17: note = Description of Artificial Sequence: Synthetic peptide; note = XENP022849 vhCDR2
WIDPELGDTEYAPKFQG

SEQ ID NO: 35971 - protein, 9 aa, synthetic construct
  source 1..9: note = Description of Artificial Sequence: Synthetic peptide; note = XENP022849 vhCDR3
RGVYQALDY

SEQ ID NO: 35972 - protein, 480 aa, synthetic construct; identical to SEQ ID NO: 23581
  source 1..480: note = Description of Artificial Sequence: Synthetic polypeptide; note = XENP022849 2A11_H1.144_L2.142_Fab-1G6_L1.194_H1.279_scFv scFv-Fc Heavy Chain

SEQ ID NO: 35973 - protein, 107 aa, synthetic construct; identical to SEQ ID NO: 10999
  source 1..107: note = Description of Artificial Sequence: Synthetic polypeptide; note = VH of XENP022849

SEQ ID NO: 35974 - protein, 122 aa, synthetic construct; identical to SEQ ID NO: 10908
  source 1..122: note = Description of Artificial Sequence: Synthetic polypeptide; note = VL of XENP022849

SEQ ID NO: 35975 - protein, 231 aa, synthetic construct; identical to SEQ ID NO: 21572
  source 1..231: note = Description of Artificial Sequence: Synthetic polypeptide; note = Fc chain of XENP022849

SEQ ID NO: 35976 - protein, 11 aa, synthetic construct
  source 1..11: note = Description of Artificial Sequence: Synthetic peptide; note = XENP022849 vhCDR1
RASQSVGNDVA

SEQ ID NO: 35977 - protein, 7 aa, synthetic construct
  source 1..7: note = Description of Artificial Sequence: Synthetic peptide; note = XENP022849 vhCDR2
YASHRYT

SEQ ID NO: 35978 - protein, 9 aa, synthetic construct
  source 1..9: note = Description of Artificial Sequence: Synthetic peptide; note = XENP022849 vhCDR3
QQDFSSPRT

SEQ ID NO: 35979 - protein, 5 aa, synthetic construct
  source 1..5: note = Description of Artificial Sequence: Synthetic peptide; note = XENP022849 vlCDR1
NYWMN

SEQ ID NO: 35980 - protein, 19 aa, synthetic construct
  source 1..19: note = Description of Artificial Sequence: Synthetic peptide; note = XENP022849 vlCDR2
EIRLYSNNYATHYAESVKG

SEQ ID NO: 35981 - protein, 11 aa, synthetic construct
  source 1..11: note = Description of Artificial Sequence: Synthetic peptide; note = XENP022849 vlCDR3
YYGNYGGYFDV

SEQ ID NO: 35982 - protein, 214 aa, synthetic construct; identical to SEQ ID NO: 22279
  source 1..214: note = Description of Artificial Sequence: Synthetic polypeptide; note = XENP022849 2A11_H1.144_L2.142_Fab-1G6_L1.194_H1.279_scFv Light Chain

SEQ ID NO: 35983 - protein, 107 aa, synthetic construct; identical to SEQ ID NO: 22280
  source 1..107: note = Description of Artificial Sequence: Synthetic polypeptide; note = VL of XENP022849

SEQ ID NO: 35984 - protein, 11 aa, synthetic construct
  source 1..11: note = Description of Artificial Sequence: Synthetic peptide; note = XENP022849 vlCDR1
QASQDIGNYLN

SEQ ID NO: 35985 - protein, 7 aa, synthetic construct
  source 1..7: note = Description of Artificial Sequence: Synthetic peptide; note = XENP022849 vlCDR2
FTSYLHS

SEQ ID NO: 35986 - protein, 9 aa, synthetic construct
  source 1..9: note = Description of Artificial Sequence: Synthetic peptide; note = XENP022849 vlCDR3
QQGNTLPYT

SEQ ID NO: 35987 - protein, 447 aa, synthetic construct; identical to SEQ ID NO: 35647
  source 1..447: note = Description of Artificial Sequence: Synthetic polypeptide; note = XENP022850 2A11_H1.144_L2.113_Fab-1G6_L1.194_H1.279_scFv Fab -Fc Heavy Chain

SEQ ID NO: 35988 - protein, 118 aa, synthetic construct; identical to SEQ ID NO: 22085
  source 1..118: note = Description of Artificial Sequence: Synthetic polypeptide; note = VH of XENP022850

SEQ ID NO: 35989 - protein, 5 aa, synthetic construct
  source 1..5: note = Description of Artificial Sequence: Synthetic peptide; note = XENP022850 vhCDR1
DYFMH

SEQ ID NO: 35990 - protein, 17 aa, synthetic construct
  source 1..17: note = Description of Artificial Sequence: Synthetic peptide; note = XENP022850 vhCDR2
WIDPELGDTEYAPKFQG

SEQ ID NO: 35991 - protein, 9 aa, synthetic construct
  source 1..9: note = Description of Artificial Sequence: Synthetic peptide; note = XENP022850 vhCDR3
RGVYQALDY

SEQ ID NO: 35992 - protein, 480 aa, synthetic construct; identical to SEQ ID NO: 23581
  source 1..480: note = Description of Artificial Sequence: Synthetic polypeptide; note = XENP022850 2A11_H1.144_L2.113_Fab-1G6_L1.194_H1.279_scFv scFv -Fc Heavy Chain

SEQ ID NO: 35993 - protein, 107 aa, synthetic construct; identical to SEQ ID NO: 10999
  source 1..107: note = Description of Artificial Sequence: Synthetic polypeptide; note = VH of XENP022850

SEQ ID NO: 35994 - protein, 122 aa, synthetic construct; identical to SEQ ID NO: 10908
  source 1..122: note = Description of Artificial Sequence: Synthetic polypeptide; note = VL of XENP022850

SEQ ID NO: 35995 - protein, 231 aa, synthetic construct; identical to SEQ ID NO: 21572
  source 1..231: note = Description of Artificial Sequence: Synthetic polypeptide; note = Fc chain of XENP022850

SEQ ID NO: 35996 - protein, 11 aa, synthetic construct
  source 1..11: note = Description of Artificial Sequence: Synthetic peptide; note = XENP022850 vhCDR1
RASQSVGNDVA

SEQ ID NO: 35997 - protein, 7 aa, synthetic construct
  source 1..7: note = Description of Artificial Sequence: Synthetic peptide; note = XENP022850 vhCDR2
YASHRYT

SEQ ID NO: 35998 - protein, 9 aa, synthetic construct
  source 1..9: note = Description of Artificial Sequence: Synthetic peptide; note = XENP022850 vhCDR3
QQDFSSPRT

SEQ ID NO: 35999 - protein, 5 aa, synthetic construct
  source 1..5: note = Description of Artificial Sequence: Synthetic peptide; note = XENP022850 vlCDR1
NYWMN

SEQ ID NO: 36000 - protein, 19 aa, synthetic construct
  source 1..19: note = Description of Artificial Sequence: Synthetic peptide; note = XENP022850 vlCDR2
EIRLYSNNYATHYAESVKG

SEQ ID NO: 36001 - protein, 11 aa, synthetic construct
  source 1..11: note = Description of Artificial Sequence: Synthetic peptide; note = XENP022850 vlCDR3
YYGNYGGYFDV

SEQ ID NO: 36002 - protein, 214 aa, synthetic construct; identical to SEQ ID NO: 22079
  source 1..214: note = Description of Artificial Sequence: Synthetic polypeptide; note = XENP022850 2A11_H1.144_L2.113_Fab-1G6_L1.194_H1.279_scFv Light Chain

SEQ ID NO: 36003 - protein, 107 aa, synthetic construct; identical to SEQ ID NO: 22080
  source 1..107: note = Description of Artificial Sequence: Synthetic polypeptide; note = VL of XENP022850

SEQ ID NO: 36004 - protein, 11 aa, synthetic construct
  source 1..11: note = Description of Artificial Sequence: Synthetic peptide; note = XENP022850 vlCDR1
QASQDIGNYLN

SEQ ID NO: 36005 - protein, 7 aa, synthetic construct
  source 1..7: note = Description of Artificial Sequence: Synthetic peptide; note = XENP022850 vlCDR2
FTSYLHS

SEQ ID NO: 36006 - protein, 9 aa, synthetic construct
  source 1..9: note = Description of Artificial Sequence: Synthetic peptide; note = XENP022850 vlCDR3
QQGNTLPYT

SEQ ID NO: 36007 - protein, 447 aa, synthetic construct; identical to SEQ ID NO: 35707
  source 1..447: note = Description of Artificial Sequence: Synthetic polypeptide; note = XENP022851 2A11_H1.125_L2.126_Fab-1G6_L1.194_H1.279_scFv Fab-Fc Heavy Chain

SEQ ID NO: 36008 - protein, 118 aa, synthetic construct; identical to SEQ ID NO: 22065
  source 1..118: note = Description of Artificial Sequence: Synthetic polypeptide; note = VH of XENP022851

SEQ ID NO: 36009 - protein, 5 aa, synthetic construct
  source 1..5: note = Description of Artificial Sequence: Synthetic peptide; note = XENP022851 vhCDR1
HYFMH

SEQ ID NO: 36010 - protein, 17 aa, synthetic construct
  source 1..17: note = Description of Artificial Sequence: Synthetic peptide; note = XENP022851 vhCDR2
WIDPYLGDTEYAPKFQG

SEQ ID NO: 36011 - protein, 9 aa, synthetic construct
  source 1..9: note = Description of Artificial Sequence: Synthetic peptide; note = XENP022851 vhCDR3
RGVYQALDY

SEQ ID NO: 36012 - protein, 480 aa, synthetic construct; identical to SEQ ID NO: 23581
  source 1..480: note = Description of Artificial Sequence: Synthetic polypeptide; note = XENP022851 2A11_H1.125_L2.126_Fab-1G6_L1.194_H1.279_scFv scFv-Fc Heavy Chain

SEQ ID NO: 36013 - protein, 107 aa, synthetic construct; identical to SEQ ID NO: 10999
  source 1..107: note = Description of Artificial Sequence: Synthetic polypeptide; note = VH of XENP022851

SEQ ID NO: 36014 - protein, 122 aa, synthetic construct; identical to SEQ ID NO: 10908
  source 1..122: note = Description of Artificial Sequence: Synthetic polypeptide; note = VL of XENP022851

SEQ ID NO: 36015 - protein, 231 aa, synthetic construct; identical to SEQ ID NO: 21572
  source 1..231: note = Description of Artificial Sequence: Synthetic polypeptide; note = Fc chain of XENP022851

SEQ ID NO: 36016 - protein, 11 aa, synthetic construct
  source 1..11: note = Description of Artificial Sequence: Synthetic peptide; note = XENP022851 vhCDR1
RASQSVGNDVA

SEQ ID NO: 36017 - protein, 7 aa, synthetic construct
  source 1..7: note = Description of Artificial Sequence: Synthetic peptide; note = XENP022851 vhCDR2
YASHRYT

SEQ ID NO: 36018 - protein, 9 aa, synthetic construct
  source 1..9: note = Description of Artificial Sequence: Synthetic peptide; note = XENP022851 vhCDR3
QQDFSSPRT

SEQ ID NO: 36019 - protein, 5 aa, synthetic construct
  source 1..5: note = Description of Artificial Sequence: Synthetic peptide; note = XENP022851 vlCDR1
NYWMN

SEQ ID NO: 36020 - protein, 19 aa, synthetic construct
  source 1..19: note = Description of Artificial Sequence: Synthetic peptide; note = XENP022851 vlCDR2
EIRLYSNNYATHYAESVKG

SEQ ID NO: 36021 - protein, 11 aa, synthetic construct
  source 1..11: note = Description of Artificial Sequence: Synthetic peptide; note = XENP022851 vlCDR3
YYGNYGGYFDV

SEQ ID NO: 36022 - protein, 214 aa, synthetic construct; identical to SEQ ID NO: 22259
  source 1..214: note = Description of Artificial Sequence: Synthetic polypeptide; note = XENP022851 2A11_H1.125_L2.126_Fab-1G6_L1.194_H1.279_scFv Light Chain

SEQ ID NO: 36023 - protein, 107 aa, synthetic construct; identical to SEQ ID NO: 22260
  source 1..107: note = Description of Artificial Sequence: Synthetic polypeptide; note = VL of XENP022851

SEQ ID NO: 36024 - protein, 11 aa, synthetic construct
  source 1..11: note = Description of Artificial Sequence: Synthetic peptide; note = XENP022851 vlCDR1
QASQDIGNYLN

SEQ ID NO: 36025 - protein, 7 aa, synthetic construct
  source 1..7: note = Description of Artificial Sequence: Synthetic peptide; note = XENP022851 vlCDR2
FTSYLHS

SEQ ID NO: 36026 - protein, 9 aa, synthetic construct
  source 1..9: note = Description of Artificial Sequence: Synthetic peptide; note = XENP022851 vlCDR3
QEGNTLPYT

SEQ ID NO: 36027 - protein, 447 aa, synthetic construct; identical to SEQ ID NO: 21564
  source 1..447: note = Description of Artificial Sequence: Synthetic polypeptide; note = XENP022852 2A11_H1_L2.113_Fab-1G6_L1.194_H1.279_scFv Fab-Fc  Heavy Chain

SEQ ID NO: 36028 - protein, 118 aa, synthetic construct; identical to SEQ ID NO: 17236
  source 1..118: note = Description of Artificial Sequence: Synthetic polypeptide; note = VH of XENP022852

SEQ ID NO: 36029 - protein, 5 aa, synthetic construct
  source 1..5: note = Description of Artificial Sequence: Synthetic peptide; note = XENP022852 vhCDR1
DYYMH

SEQ ID NO: 36030 - protein, 17 aa, synthetic construct
  source 1..17: note = Description of Artificial Sequence: Synthetic peptide; note = XENP022852 vhCDR2
WIDPENGDTEYAPKFQG

SEQ ID NO: 36031 - protein, 9 aa, synthetic construct
  source 1..9: note = Description of Artificial Sequence: Synthetic peptide; note = XENP022852 vhCDR3
RGVRQALDY

SEQ ID NO: 36032 - protein, 480 aa, synthetic construct; identical to SEQ ID NO: 23581
  source 1..480: note = Description of Artificial Sequence: Synthetic polypeptide; note = XENP022852 2A11_H1_L2.113_Fab-1G6_L1.194_H1.279_scFv scFv-Fc  Heavy Chain

SEQ ID NO: 36033 - protein, 107 aa, synthetic construct; identical to SEQ ID NO: 10999
  source 1..107: note = Description of Artificial Sequence: Synthetic polypeptide; note = VH of XENP022852

SEQ ID NO: 36034 - protein, 122 aa, synthetic construct; identical to SEQ ID NO: 10908
  source 1..122: note = Description of Artificial Sequence: Synthetic polypeptide; note = VL of XENP022852

SEQ ID NO: 36035 - protein, 231 aa, synthetic construct; identical to SEQ ID NO: 21572
  source 1..231: note = Description of Artificial Sequence: Synthetic polypeptide; note = Fc chain of XENP022852

SEQ ID NO: 36036 - protein, 11 aa, synthetic construct
  source 1..11: note = Description of Artificial Sequence: Synthetic peptide; note = XENP022852 vhCDR1
RASQSVGNDVA

SEQ ID NO: 36037 - protein, 7 aa, synthetic construct
  source 1..7: note = Description of Artificial Sequence: Synthetic peptide; note = XENP022852 vhCDR2
YASHRYT

SEQ ID NO: 36038 - protein, 9 aa, synthetic construct
  source 1..9: note = Description of Artificial Sequence: Synthetic peptide; note = XENP022852 vhCDR3
QQDFSSPRT

SEQ ID NO: 36039 - protein, 5 aa, synthetic construct
  source 1..5: note = Description of Artificial Sequence: Synthetic peptide; note = XENP022852 vlCDR1
NYWMN

SEQ ID NO: 36040 - protein, 19 aa, synthetic construct
  source 1..19: note = Description of Artificial Sequence: Synthetic peptide; note = XENP022852 vlCDR2
EIRLYSNNYATHYAESVKG

SEQ ID NO: 36041 - protein, 11 aa, synthetic construct
  source 1..11: note = Description of Artificial Sequence: Synthetic peptide; note = XENP022852 vlCDR3
YYGNYGGYFDV

SEQ ID NO: 36042 - protein, 214 aa, synthetic construct; identical to SEQ ID NO: 22079
  source 1..214: note = Description of Artificial Sequence: Synthetic polypeptide; note = XENP022852 2A11_H1_L2.113_Fab-1G6_L1.194_H1.279_scFv Light  Chain

SEQ ID NO: 36043 - protein, 107 aa, synthetic construct; identical to SEQ ID NO: 22080
  source 1..107: note = Description of Artificial Sequence: Synthetic polypeptide; note = VL of XENP022852

SEQ ID NO: 36044 - protein, 11 aa, synthetic construct
  source 1..11: note = Description of Artificial Sequence: Synthetic peptide; note = XENP022852 vlCDR1
QASQDIGNYLN

SEQ ID NO: 36045 - protein, 7 aa, synthetic construct
  source 1..7: note = Description of Artificial Sequence: Synthetic peptide; note = XENP022852 vlCDR2
FTSYLHS

SEQ ID NO: 36046 - protein, 9 aa, synthetic construct
  source 1..9: note = Description of Artificial Sequence: Synthetic peptide; note = XENP022852 vlCDR3
QQGNTLPYT

SEQ ID NO: 36047 - protein, 447 aa, synthetic construct; identical to SEQ ID NO: 17235
  source 1..447: note = Description of Artificial Sequence: Synthetic polypeptide; note = XENP023349 2A11_H1L2_Fab-1C11_H3L3_scFv Fab-Fc Heavy Chain

SEQ ID NO: 36048 - protein, 118 aa, synthetic construct; identical to SEQ ID NO: 17236
  source 1..118: note = Description of Artificial Sequence: Synthetic polypeptide; note = VH of XENP023349

SEQ ID NO: 36049 - protein, 5 aa, synthetic construct
  source 1..5: note = Description of Artificial Sequence: Synthetic peptide; note = XENP023349 vhCDR1
DYYMH

SEQ ID NO: 36050 - protein, 17 aa, synthetic construct
  source 1..17: note = Description of Artificial Sequence: Synthetic peptide; note = XENP023349 vhCDR2
WIDPENGDTEYAPKFQG

SEQ ID NO: 36051 - protein, 9 aa, synthetic construct
  source 1..9: note = Description of Artificial Sequence: Synthetic peptide; note = XENP023349 vhCDR3
RGVRQALDY

SEQ ID NO: 36052 - protein, 480 aa, synthetic construct
  source 1..480: note = Description of Artificial Sequence: Synthetic polypeptide; note = XENP023349 2A11_H1L2_Fab-1C11_H3L3_scFv scFv-Fc Heavy Chain
QIQLVQSGSELKKPGASVKVSCKASGYTFTHYGMNWVRQAPGQGLEWMGWINTYTGEPTYADGFTGRFVFSLDTSVSTAYLQISSLKAEDTAVYFCARDYYGSSPYWGQGTLVTVSSGKPGSGKPGSGKPGSGKPGSDVLMTQSPDSLAVSLGERATINCKSSQSIVHSNGNTYLEWYQQKPGQSPKLLIYKVSNRFSGVPDRFSGSGSGTDFTLTISSLQAEDVAVYYCFQGSHVPNTFGGGTKVEIKEPKSSDKTHTCPPCPAPPVAGPSVFLFPPKPKDTLMISRTPEVTCVVVDVKHEDPEVKFNWYVDGVEVHNAKTKPREEQYNSTYRVVSVLTVLHQDWLNGKEYKCKVSNKALPAPIEKTISKAKGQPREPQVYTLPPSREQMTKNQVKLTCLVKGFYPSDIAVEWESNGQPENNYKTTPPVLDSDGSFFLYSKLTVDKSRWQQGNVFSCSVMHEALHNHYTQKSLSLSPGK

SEQ ID NO: 36053 - protein, 117 aa, synthetic construct; identical to SEQ ID NO: 33034
  source 1..117: note = Description of Artificial Sequence: Synthetic polypeptide; note = VH of XENP023349

SEQ ID NO: 36054 - protein, 112 aa, synthetic construct; identical to SEQ ID NO: 33009
  source 1..112: note = Description of Artificial Sequence: Synthetic polypeptide; note = VL of XENP023349

SEQ ID NO: 36055 - protein, 231 aa, synthetic construct; identical to SEQ ID NO: 21532
  source 1..231: note = Description of Artificial Sequence: Synthetic polypeptide; note = Fc chain of XENP023349

SEQ ID NO: 36056 - protein, 5 aa, synthetic construct
  source 1..5: note = Description of Artificial Sequence: Synthetic peptide; note = XENP023349 vhCDR1
HYGMN

SEQ ID NO: 36057 - protein, 17 aa, synthetic construct
  source 1..17: note = Description of Artificial Sequence: Synthetic peptide; note = XENP023349 vhCDR2
WINTYTGEPTYADGFTG

SEQ ID NO: 36058 - protein, 8 aa, synthetic construct
  source 1..8: note = Description of Artificial Sequence: Synthetic peptide; note = XENP023349 vhCDR3
DYYGSSPY

SEQ ID NO: 36059 - protein, 16 aa, synthetic construct
  source 1..16: note = Description of Artificial Sequence: Synthetic peptide; note = XENP023349 vlCDR1
KSSQSIVHSNGNTYLE

SEQ ID NO: 36060 - protein, 7 aa, synthetic construct
  source 1..7: note = Description of Artificial Sequence: Synthetic peptide; note = XENP023349 vlCDR2
KVSNRFS

SEQ ID NO: 36061 - protein, 9 aa, synthetic construct
  source 1..9: note = Description of Artificial Sequence: Synthetic peptide; note = XENP023349 vlCDR3
FQGSHVPNT

SEQ ID NO: 36062 - protein, 214 aa, synthetic construct; identical to SEQ ID NO: 17250
  source 1..214: note = Description of Artificial Sequence: Synthetic polypeptide; note = XENP023349 2A11_H1L2_Fab-1C11_H3L3_scFv Light Chain

SEQ ID NO: 36063 - protein, 107 aa, synthetic construct; identical to SEQ ID NO: 17251
  source 1..107: note = Description of Artificial Sequence: Synthetic polypeptide; note = VL of XENP023349

SEQ ID NO: 36064 - protein, 11 aa, synthetic construct
  source 1..11: note = Description of Artificial Sequence: Synthetic peptide; note = XENP023349 vlCDR1
QASQDIGNYLN

SEQ ID NO: 36065 - protein, 7 aa, synthetic construct
  source 1..7: note = Description of Artificial Sequence: Synthetic peptide; note = XENP023349 vlCDR2
YTSRLHS

SEQ ID NO: 36066 - protein, 9 aa, synthetic construct
  source 1..9: note = Description of Artificial Sequence: Synthetic peptide; note = XENP023349 vlCDR3
QQGNTLPYT

SEQ ID NO: 36067 - protein, 447 aa, synthetic construct; identical to SEQ ID NO: 22084
  source 1..447: note = Description of Artificial Sequence: Synthetic polypeptide; note = XENP023350 2A11_H1.144_L2.142_Fab-1C11_H3L3_scFv Fab-Fc Heavy Chain

SEQ ID NO: 36068 - protein, 118 aa, synthetic construct; identical to SEQ ID NO: 22085
  source 1..118: note = Description of Artificial Sequence: Synthetic polypeptide; note = VH of XENP023350

SEQ ID NO: 36069 - protein, 5 aa, synthetic construct
  source 1..5: note = Description of Artificial Sequence: Synthetic peptide; note = XENP023350 vhCDR1
DYFMH

SEQ ID NO: 36070 - protein, 17 aa, synthetic construct
  source 1..17: note = Description of Artificial Sequence: Synthetic peptide; note = XENP023350 vhCDR2
WIDPELGDTEYAPKFQG

SEQ ID NO: 36071 - protein, 9 aa, synthetic construct
  source 1..9: note = Description of Artificial Sequence: Synthetic peptide; note = XENP023350 vhCDR3
RGVYQALDY

SEQ ID NO: 36072 - protein, 480 aa, synthetic construct; identical to SEQ ID NO: 36052
  source 1..480: note = Description of Artificial Sequence: Synthetic polypeptide; note = XENP023350 2A11_H1.144_L2.142_Fab-1C11_H3L3_scFv scFv-Fc Heavy Chain

SEQ ID NO: 36073 - protein, 117 aa, synthetic construct; identical to SEQ ID NO: 33034
  source 1..117: note = Description of Artificial Sequence: Synthetic polypeptide; note = VH of XENP023350

SEQ ID NO: 36074 - protein, 112 aa, synthetic construct; identical to SEQ ID NO: 33009
  source 1..112: note = Description of Artificial Sequence: Synthetic polypeptide; note = VL of XENP023350

SEQ ID NO: 36075 - protein, 231 aa, synthetic construct; identical to SEQ ID NO: 21532
  source 1..231: note = Description of Artificial Sequence: Synthetic polypeptide; note = Fc chain of XENP023350

SEQ ID NO: 36076 - protein, 5 aa, synthetic construct
  source 1..5: note = Description of Artificial Sequence: Synthetic peptide; note = XENP023350 vhCDR1
HYGMN

SEQ ID NO: 36077 - protein, 17 aa, synthetic construct
  source 1..17: note = Description of Artificial Sequence: Synthetic peptide; note = XENP023350 vhCDR2
WINTYTGEPTYADGFTG

SEQ ID NO: 36078 - protein, 8 aa, synthetic construct
  source 1..8: note = Description of Artificial Sequence: Synthetic peptide; note = XENP023350 vhCDR3
DYYGSSPY

SEQ ID NO: 36079 - protein, 16 aa, synthetic construct
  source 1..16: note = Description of Artificial Sequence: Synthetic peptide; note = XENP023350 vlCDR1
KSSQSIVHSNGNTYLE

SEQ ID NO: 36080 - protein, 7 aa, synthetic construct
  source 1..7: note = Description of Artificial Sequence: Synthetic peptide; note = XENP023350 vlCDR2
KVSNRFS

SEQ ID NO: 36081 - protein, 9 aa, synthetic construct
  source 1..9: note = Description of Artificial Sequence: Synthetic peptide; note = XENP023350 vlCDR3
FQGSHVPNT

SEQ ID NO: 36082 - protein, 214 aa, synthetic construct; identical to SEQ ID NO: 22279
  source 1..214: note = Description of Artificial Sequence: Synthetic polypeptide; note = XENP023350 2A11_H1.144_L2.142_Fab-1C11_H3L3_scFv Light Chain

SEQ ID NO: 36083 - protein, 107 aa, synthetic construct; identical to SEQ ID NO: 22280
  source 1..107: note = Description of Artificial Sequence: Synthetic polypeptide; note = VL of XENP023350

SEQ ID NO: 36084 - protein, 11 aa, synthetic construct
  source 1..11: note = Description of Artificial Sequence: Synthetic peptide; note = XENP023350 vlCDR1
QASQDIGNYLN

SEQ ID NO: 36085 - protein, 7 aa, synthetic construct
  source 1..7: note = Description of Artificial Sequence: Synthetic peptide; note = XENP023350 vlCDR2
FTSYLHS

SEQ ID NO: 36086 - protein, 9 aa, synthetic construct
  source 1..9: note = Description of Artificial Sequence: Synthetic peptide; note = XENP023350 vlCDR3
QQGNTLPYT

SEQ ID NO: 36087 - protein, 447 aa, synthetic construct; identical to SEQ ID NO: 17235
  source 1..447: note = Description of Artificial Sequence: Synthetic polypeptide; note = XENP023351 2A11_H1L2_Fab-2E9_H1L1_scFv Fab-Fc Heavy Chain

SEQ ID NO: 36088 - protein, 118 aa, synthetic construct; identical to SEQ ID NO: 17236
  source 1..118: note = Description of Artificial Sequence: Synthetic polypeptide; note = VH of XENP023351

SEQ ID NO: 36089 - protein, 5 aa, synthetic construct
  source 1..5: note = Description of Artificial Sequence: Synthetic peptide; note = XENP023351 vhCDR1
DYYMH

SEQ ID NO: 36090 - protein, 17 aa, synthetic construct
  source 1..17: note = Description of Artificial Sequence: Synthetic peptide; note = XENP023351 vhCDR2
WIDPENGDTEYAPKFQG

SEQ ID NO: 36091 - protein, 9 aa, synthetic construct
  source 1..9: note = Description of Artificial Sequence: Synthetic peptide; note = XENP023351 vhCDR3
RGVRQALDY

SEQ ID NO: 36092 - protein, 478 aa, synthetic construct
  source 1..478: note = Description of Artificial Sequence: Synthetic polypeptide; note = XENP023351 2A11_H1L2_Fab-2E9_H1L1_scFv scFv-Fc Heavy Chain
QVQLVQSGAEVKKPGASVKVSCKASGYAFTNYWLGWVRQAPGQGLEWMGNFYPGSSNTYYNEKFQGRVTMTADKSISTAYMELSRLRSDDTAVYFCARHYGTNYRYFDVWGAGTLVTVSSGKPGSGKPGSGKPGSGKPGSDIVLTQSPGTLSLSPGERATLSCRASQSVSNDVAWYQQKPGQSPRLLIYYASNRYTGVPDRFTGSGYGTDFTLTISRLEPEDFAVYFCQQDYSSPYTFGGGTKVEIKEPKSSDKTHTCPPCPAPPVAGPSVFLFPPKPKDTLMISRTPEVTCVVVDVKHEDPEVKFNWYVDGVEVHNAKTKPREEQYNSTYRVVSVLTVLHQDWLNGKEYKCKVSNKALPAPIEKTISKAKGQPREPQVYTLPPSREQMTKNQVKLTCLVKGFYPSDIAVEWESNGQPENNYKTTPPVLDSDGSFFLYSKLTVDKSRWQQGNVFSCSVMHEALHNHYTQKSLSLSPGK

SEQ ID NO: 36093 - protein, 120 aa, synthetic construct; identical to SEQ ID NO: 11412
  source 1..120: note = Description of Artificial Sequence: Synthetic polypeptide; note = VH of XENP023351

SEQ ID NO: 36094 - protein, 107 aa, synthetic construct; identical to SEQ ID NO: 11413
  source 1..107: note = Description of Artificial Sequence: Synthetic polypeptide; note = VL of XENP023351

SEQ ID NO: 36095 - protein, 231 aa, synthetic construct; identical to SEQ ID NO: 21532
  source 1..231: note = Description of Artificial Sequence: Synthetic polypeptide; note = Fc chain of XENP023351

SEQ ID NO: 36096 - protein, 5 aa, synthetic construct
  source 1..5: note = Description of Artificial Sequence: Synthetic peptide; note = XENP023351 vhCDR1
NYWLG

SEQ ID NO: 36097 - protein, 17 aa, synthetic construct
  source 1..17: note = Description of Artificial Sequence: Synthetic peptide; note = XENP023351 vhCDR2
NFYPGSSNTYYNEKFQG

SEQ ID NO: 36098 - protein, 11 aa, synthetic construct
  source 1..11: note = Description of Artificial Sequence: Synthetic peptide; note = XENP023351 vhCDR3
HYGTNYRYFDV

SEQ ID NO: 36099 - protein, 11 aa, synthetic construct
  source 1..11: note = Description of Artificial Sequence: Synthetic peptide; note = XENP023351 vlCDR1
RASQSVSNDVA

SEQ ID NO: 36100 - protein, 7 aa, synthetic construct
  source 1..7: note = Description of Artificial Sequence: Synthetic peptide; note = XENP023351 vlCDR2
YASNRYT

SEQ ID NO: 36101 - protein, 9 aa, synthetic construct
  source 1..9: note = Description of Artificial Sequence: Synthetic peptide; note = XENP023351 vlCDR3
QQDYSSPYT

SEQ ID NO: 36102 - protein, 214 aa, synthetic construct; identical to SEQ ID NO: 17250
  source 1..214: note = Description of Artificial Sequence: Synthetic polypeptide; note = XENP023351 2A11_H1L2_Fab-2E9_H1L1_scFv Light Chain

SEQ ID NO: 36103 - protein, 107 aa, synthetic construct; identical to SEQ ID NO: 17251
  source 1..107: note = Description of Artificial Sequence: Synthetic polypeptide; note = VL of XENP023351

SEQ ID NO: 36104 - protein, 11 aa, synthetic construct
  source 1..11: note = Description of Artificial Sequence: Synthetic peptide; note = XENP023351 vlCDR1
QASQDIGNYLN

SEQ ID NO: 36105 - protein, 7 aa, synthetic construct
  source 1..7: note = Description of Artificial Sequence: Synthetic peptide; note = XENP023351 vlCDR2
YTSRLHS

SEQ ID NO: 36106 - protein, 9 aa, synthetic construct
  source 1..9: note = Description of Artificial Sequence: Synthetic peptide; note = XENP023351 vlCDR3
QQGNTLPYT

SEQ ID NO: 36107 - protein, 447 aa, synthetic construct; identical to SEQ ID NO: 22084
  source 1..447: note = Description of Artificial Sequence: Synthetic polypeptide; note = XENP023352 2A11_H1.144_L2.142_Fab-2E9_H1L1_scFv Fab-Fc Heavy Chain

SEQ ID NO: 36108 - protein, 118 aa, synthetic construct; identical to SEQ ID NO: 22085
  source 1..118: note = Description of Artificial Sequence: Synthetic polypeptide; note = VH of XENP023352

SEQ ID NO: 36109 - protein, 5 aa, synthetic construct
  source 1..5: note = Description of Artificial Sequence: Synthetic peptide; note = XENP023352 vhCDR1
DYFMH

SEQ ID NO: 36110 - protein, 17 aa, synthetic construct
  source 1..17: note = Description of Artificial Sequence: Synthetic peptide; note = XENP023352 vhCDR2
WIDPELGDTEYAPKFQG

SEQ ID NO: 36111 - protein, 9 aa, synthetic construct
  source 1..9: note = Description of Artificial Sequence: Synthetic peptide; note = XENP023352 vhCDR3
RGVYQALDY

SEQ ID NO: 36112 - protein, 458 aa, synthetic construct
  source 1..458: note = Description of Artificial Sequence: Synthetic polypeptide; note = XENP023352 2A11_H1.144_L2.142_Fab-2E9_H1L1_scFv scFv-Fc Heavy Chain
QVQLVQSGAEVKKPGASVKVSCKASGYAFTNYWLGWVRQAPGQGLEWMGNFYPGSSNTYYNEKFQGRVTMTADKSISTAYMELSRLRSDDTAVYFCARHYGTNYRYFDVWGAGTLVTVSSDIVLTQSPGTLSLSPGERATLSCRASQSVSNDVAWYQQKPGQSPRLLIYYASNRYTGVPDRFTGSGYGTDFTLTISRLEPEDFAVYFCQQDYSSPYTFGGGTKVEIKEPKSSDKTHTCPPCPAPPVAGPSVFLFPPKPKDTLMISRTPEVTCVVVDVKHEDPEVKFNWYVDGVEVHNAKTKPREEQYNSTYRVVSVLTVLHQDWLNGKEYKCKVSNKALPAPIEKTISKAKGQPREPQVYTLPPSREQMTKNQVKLTCLVKGFYPSDIAVEWESNGQPENNYKTTPPVLDSDGSFFLYSKLTVDKSRWQQGNVFSCSVMHEALHNHYTQKSLSLSPGK

SEQ ID NO: 36113 - protein, 120 aa, synthetic construct; identical to SEQ ID NO: 11412
  source 1..120: note = Description of Artificial Sequence: Synthetic polypeptide; note = VH of XENP023352

SEQ ID NO: 36114 - protein, 107 aa, synthetic construct; identical to SEQ ID NO: 11413
  source 1..107: note = Description of Artificial Sequence: Synthetic polypeptide; note = VL of XENP023352

SEQ ID NO: 36115 - protein, 231 aa, synthetic construct; identical to SEQ ID NO: 21532
  source 1..231: note = Description of Artificial Sequence: Synthetic polypeptide; note = Fc chain of XENP023352

SEQ ID NO: 36116 - protein, 5 aa, synthetic construct
  source 1..5: note = Description of Artificial Sequence: Synthetic peptide; note = XENP023352 vhCDR1
NYWLG

SEQ ID NO: 36117 - protein, 17 aa, synthetic construct
  source 1..17: note = Description of Artificial Sequence: Synthetic peptide; note = XENP023352 vhCDR2
NFYPGSSNTYYNEKFQG

SEQ ID NO: 36118 - protein, 11 aa, synthetic construct
  source 1..11: note = Description of Artificial Sequence: Synthetic peptide; note = XENP023352 vhCDR3
HYGTNYRYFDV

SEQ ID NO: 36119 - protein, 11 aa, synthetic construct
  source 1..11: note = Description of Artificial Sequence: Synthetic peptide; note = XENP023352 vlCDR1
RASQSVSNDVA

SEQ ID NO: 36120 - protein, 7 aa, synthetic construct
  source 1..7: note = Description of Artificial Sequence: Synthetic peptide; note = XENP023352 vlCDR2
YASNRYT

SEQ ID NO: 36121 - protein, 9 aa, synthetic construct
  source 1..9: note = Description of Artificial Sequence: Synthetic peptide; note = XENP023352 vlCDR3
QQDYSSPYT

SEQ ID NO: 36122 - protein, 214 aa, synthetic construct; identical to SEQ ID NO: 22279
  source 1..214: note = Description of Artificial Sequence: Synthetic polypeptide; note = XENP023352 2A11_H1.144_L2.142_Fab-2E9_H1L1_scFv Light Chain

SEQ ID NO: 36123 - protein, 107 aa, synthetic construct; identical to SEQ ID NO: 22280
  source 1..107: note = Description of Artificial Sequence: Synthetic polypeptide; note = VL of XENP023352

SEQ ID NO: 36124 - protein, 11 aa, synthetic construct
  source 1..11: note = Description of Artificial Sequence: Synthetic peptide; note = XENP023352 vlCDR1
QASQDIGNYLN

SEQ ID NO: 36125 - protein, 7 aa, synthetic construct
  source 1..7: note = Description of Artificial Sequence: Synthetic peptide; note = XENP023352 vlCDR2
FTSYLHS

SEQ ID NO: 36126 - protein, 9 aa, synthetic construct
  source 1..9: note = Description of Artificial Sequence: Synthetic peptide; note = XENP023352 vlCDR3
QQGNTLPYT

SEQ ID NO: 36127 - protein, 446 aa, synthetic construct
  source 1..446: note = Description of Artificial Sequence: Synthetic polypeptide; note = XENP022856 1C11_H3L3_IgG1_PVA_/S267K/M428L/N434S Heavy Chain
QIQLVQSGSELKKPGASVKVSCKASGYTFTHYGMNWVRQAPGQGLEWMGWINTYTGEPTYADGFTGRFVFSLDTSVSTAYLQISSLKAEDTAVYFCARDYYGSSPYWGQGTLVTVSSASTKGPSVFPLAPSSKSTSGGTAALGCLVKDYFPEPVTVSWNSGALTSGVHTFPAVLQSSGLYSLSSVVTVPSSSLGTQTYICNVNHKPSNTKVDKKVEPKSCDKTHTCPPCPAPPVAGPSVFLFPPKPKDTLMISRTPEVTCVVVDVKHEDPEVKFNWYVDGVEVHNAKTKPREEQYNSTYRVVSVLTVLHQDWLNGKEYKCKVSNKALPAPIEKTISKAKGQPREPQVYTLPPSREEMTKNQVSLTCLVKGFYPSDIAVEWESNGQPENNYKTTPPVLDSDGSFFLYSKLTVDKSRWQQGNVFSCSVLHEALHSHYTQKSLSLSPGK

SEQ ID NO: 36128 - protein, 117 aa, synthetic construct; identical to SEQ ID NO: 33034
  source 1..117: note = Description of Artificial Sequence: Synthetic polypeptide; note = VH of XENP022856

SEQ ID NO: 36129 - protein, 5 aa, synthetic construct
  source 1..5: note = Description of Artificial Sequence: Synthetic peptide; note = XENP022856 vhCDR1
HYGMN

SEQ ID NO: 36130 - protein, 17 aa, synthetic construct
  source 1..17: note = Description of Artificial Sequence: Synthetic peptide; note = XENP022856 vhCDR2
WINTYTGEPTYADGFTG

SEQ ID NO: 36131 - protein, 8 aa, synthetic construct
  source 1..8: note = Description of Artificial Sequence: Synthetic peptide; note = XENP022856 vhCDR3
DYYGSSPY

SEQ ID NO: 36132 - protein, 219 aa, synthetic construct; identical to SEQ ID NO: 33008
  source 1..219: note = Description of Artificial Sequence: Synthetic polypeptide; note = XENP022856 1C11_H3L3_IgG1_PVA_/S267K/M428L/N434S Light Chain

SEQ ID NO: 36133 - protein, 112 aa, synthetic construct; identical to SEQ ID NO: 33009
  source 1..112: note = Description of Artificial Sequence: Synthetic polypeptide; note = VL of XENP022856

SEQ ID NO: 36134 - protein, 16 aa, synthetic construct
  source 1..16: note = Description of Artificial Sequence: Synthetic peptide; note = XENP022856 vlCDR1
KSSQSIVHSNGNTYLE

SEQ ID NO: 36135 - protein, 7 aa, synthetic construct
  source 1..7: note = Description of Artificial Sequence: Synthetic peptide; note = XENP022856 vlCDR2
KVSNRFS

SEQ ID NO: 36136 - protein, 9 aa, synthetic construct
  source 1..9: note = Description of Artificial Sequence: Synthetic peptide; note = XENP022856 vlCDR3
FQGSHVPNT

SEQ ID NO: 36137 - protein, 449 aa, synthetic construct
  source 1..449: note = Description of Artificial Sequence: Synthetic polypeptide; note = XENP022857 2E9_H1L1_IgG1_PVA_/S267K/M428L/N434S Heavy Chain
QVQLVQSGAEVKKPGASVKVSCKASGYAFTNYWLGWVRQAPGQGLEWMGNFYPGSSNTYYNEKFQGRVTMTADKSISTAYMELSRLRSDDTAVYFCARHYGTNYRYFDVWGAGTLVTVSSASTKGPSVFPLAPSSKSTSGGTAALGCLVKDYFPEPVTVSWNSGALTSGVHTFPAVLQSSGLYSLSSVVTVPSSSLGTQTYICNVNHKPSNTKVDKKVEPKSCDKTHTCPPCPAPPVAGPSVFLFPPKPKDTLMISRTPEVTCVVVDVKHEDPEVKFNWYVDGVEVHNAKTKPREEQYNSTYRVVSVLTVLHQDWLNGKEYKCKVSNKALPAPIEKTISKAKGQPREPQVYTLPPSREEMTKNQVSLTCLVKGFYPSDIAVEWESNGQPENNYKTTPPVLDSDGSFFLYSKLTVDKSRWQQGNVFSCSVLHEALHSHYTQKSLSLSPGK

SEQ ID NO: 36138 - protein, 120 aa, synthetic construct; identical to SEQ ID NO: 11412
  source 1..120: note = Description of Artificial Sequence: Synthetic polypeptide; note = VH of XENP022857

SEQ ID NO: 36139 - protein, 5 aa, synthetic construct
  source 1..5: note = Description of Artificial Sequence: Synthetic peptide; note = XENP022857 vhCDR1
NYWLG

SEQ ID NO: 36140 - protein, 17 aa, synthetic construct
  source 1..17: note = Description of Artificial Sequence: Synthetic peptide; note = XENP022857 vhCDR2
NFYPGSSNTYYNEKFQG

SEQ ID NO: 36141 - protein, 11 aa, synthetic construct
  source 1..11: note = Description of Artificial Sequence: Synthetic peptide; note = XENP022857 vhCDR3
HYGTNYRYFDV

SEQ ID NO: 36142 - protein, 214 aa, synthetic construct; identical to SEQ ID NO: 17080
  source 1..214: note = Description of Artificial Sequence: Synthetic polypeptide; note = XENP022857 2E9_H1L1_IgG1_PVA_/S267K/M428L/N434S Light Chain

SEQ ID NO: 36143 - protein, 107 aa, synthetic construct; identical to SEQ ID NO: 11413
  source 1..107: note = Description of Artificial Sequence: Synthetic polypeptide; note = VL of XENP022857

SEQ ID NO: 36144 - protein, 11 aa, synthetic construct
  source 1..11: note = Description of Artificial Sequence: Synthetic peptide; note = XENP022857 vlCDR1
RASQSVSNDVA

SEQ ID NO: 36145 - protein, 7 aa, synthetic construct
  source 1..7: note = Description of Artificial Sequence: Synthetic peptide; note = XENP022857 vlCDR2
YASNRYT

SEQ ID NO: 36146 - protein, 9 aa, synthetic construct
  source 1..9: note = Description of Artificial Sequence: Synthetic peptide; note = XENP022857 vlCDR3
QQDYSSPYT

SEQ ID NO: 36147 - protein, 447 aa, synthetic construct
  source 1..447: note = Description of Artificial Sequence: Synthetic polypeptide; note = XENP022858 9C6_H1.1_L1_Fab-1G6_L1.194_H1.279_scFv Fab-Fc Heavy Chain
QVQLKESGAEVKKPGASVKVSCKVSGFSLTGYGVNWVRQAPGQGLEWMGMIWIDGSTDYNSKFQGRVTMTKDNSKSTVYMELSSLRSEDTAVYYCARDRPDGRAMDYWGQGTMVTVSSASTKGPSVFPLAPSSKSTSGGTAALGCLVKDYFPEPVTVSWNSGALTSGVHTFPAVLQSSGLYSLSSVVTVPSSSLGTQTYICNVNHKPSDTKVDKKVEPKSCDKTHTCPPCPAPPVAGPSVFLFPPKPKDTLMISRTPEVTCVVVDVKHEDPEVKFNWYVDGVEVHNAKTKPREEEYNSTYRVVSVLTVLHQDWLNGKEYKCKVSNKALPAPIEKTISKAKGQPREPQVYTLPPSREEMTKNQVSLTCDVSGFYPSDIAVEWESDGQPENNYKTTPPVLDSDGSFFLYSKLTVDKSRWEQGDVFSCSVLHEALHSHYTQKSLSLSPGK

SEQ ID NO: 36148 - protein, 118 aa, synthetic construct; identical to SEQ ID NO: 21205
  source 1..118: note = Description of Artificial Sequence: Synthetic polypeptide; note = VH of XENP022858

SEQ ID NO: 36149 - protein, 5 aa, synthetic construct
  source 1..5: note = Description of Artificial Sequence: Synthetic peptide; note = XENP022858 vhCDR1
GYGVN

SEQ ID NO: 36150 - protein, 16 aa, synthetic construct
  source 1..16: note = Description of Artificial Sequence: Synthetic peptide; note = XENP022858 vhCDR2
MIWIDGSTDYNSKFQG

SEQ ID NO: 36151 - protein, 10 aa, synthetic construct
  source 1..10: note = Description of Artificial Sequence: Synthetic peptide; note = XENP022858 vhCDR3
DRPDGRAMDY

SEQ ID NO: 36152 - protein, 480 aa, synthetic construct; identical to SEQ ID NO: 23581
  source 1..480: note = Description of Artificial Sequence: Synthetic polypeptide; note = XENP022858 9C6_H1.1_L1_Fab-1G6_L1.194_H1.279_scFv scFv-Fc Heavy Chain

SEQ ID NO: 36153 - protein, 107 aa, synthetic construct; identical to SEQ ID NO: 10999
  source 1..107: note = Description of Artificial Sequence: Synthetic polypeptide; note = VH of XENP022858

SEQ ID NO: 36154 - protein, 122 aa, synthetic construct; identical to SEQ ID NO: 10908
  source 1..122: note = Description of Artificial Sequence: Synthetic polypeptide; note = VL of XENP022858

SEQ ID NO: 36155 - protein, 231 aa, synthetic construct; identical to SEQ ID NO: 21572
  source 1..231: note = Description of Artificial Sequence: Synthetic polypeptide; note = Fc chain of XENP022858

SEQ ID NO: 36156 - protein, 11 aa, synthetic construct
  source 1..11: note = Description of Artificial Sequence: Synthetic peptide; note = XENP022858 vhCDR1
RASQSVGNDVA

SEQ ID NO: 36157 - protein, 7 aa, synthetic construct
  source 1..7: note = Description of Artificial Sequence: Synthetic peptide; note = XENP022858 vhCDR2
YASHRYT

SEQ ID NO: 36158 - protein, 9 aa, synthetic construct
  source 1..9: note = Description of Artificial Sequence: Synthetic peptide; note = XENP022858 vhCDR3
QQDFSSPRT

SEQ ID NO: 36159 - protein, 5 aa, synthetic construct
  source 1..5: note = Description of Artificial Sequence: Synthetic peptide; note = XENP022858 vlCDR1
NYWMN

SEQ ID NO: 36160 - protein, 19 aa, synthetic construct
  source 1..19: note = Description of Artificial Sequence: Synthetic peptide; note = XENP022858 vlCDR2
EIRLYSNNYATHYAESVKG

SEQ ID NO: 36161 - protein, 11 aa, synthetic construct
  source 1..11: note = Description of Artificial Sequence: Synthetic peptide; note = XENP022858 vlCDR3
YYGNYGGYFDV

SEQ ID NO: 36162 - protein, 213 aa, synthetic construct; identical to SEQ ID NO: 21050
  source 1..213: note = Description of Artificial Sequence: Synthetic polypeptide; note = XENP022858 9C6_H1.1_L1_Fab-1G6_L1.194_H1.279_scFv Light Chain

SEQ ID NO: 36163 - protein, 106 aa, synthetic construct; identical to SEQ ID NO: 21051
  source 1..106: note = Description of Artificial Sequence: Synthetic polypeptide; note = VL of XENP022858

SEQ ID NO: 36164 - protein, 11 aa, synthetic construct
  source 1..11: note = Description of Artificial Sequence: Synthetic peptide; note = XENP022858 vlCDR1
KASQSVSNDVA

SEQ ID NO: 36165 - protein, 7 aa, synthetic construct
  source 1..7: note = Description of Artificial Sequence: Synthetic peptide; note = XENP022858 vlCDR2
YASNRYT

SEQ ID NO: 36166 - protein, 8 aa, synthetic construct
  source 1..8: note = Description of Artificial Sequence: Synthetic peptide; note = XENP022858 vlCDR3
QQDYSSPT

SEQ ID NO: 36167 - protein, 446 aa, synthetic construct
  source 1..446: note = Description of Artificial Sequence: Synthetic polypeptide; note = XENP022726 1C11_H1L3_Fab-[CTLA-4]_H3.23_L0.129_scFv Fab-Fc  Heavy Chain
QIQLVQSGAEVKKPGASVKVSCKASGYTFTHYGMNWVRQAPGQGLEWMGWINTYTGEPTYADKFQGRVTMTLDTSTSTAYMELSSLRSEDTAVYFCARDYYGSSPYWGQGTLVTVSSASTKGPSVFPLAPSSKSTSGGTAALGCLVKDYFPEPVTVSWNSGALTSGVHTFPAVLQSSGLYSLSSVVTVPSSSLGTQTYICNVNHKPSDTKVDKKVEPKSCDKTHTCPPCPAPPVAGPSVFLFPPKPKDTLMISRTPEVTCVVVDVKHEDPEVKFNWYVDGVEVHNAKTKPREEEYNSTYRVVSVLTVLHQDWLNGKEYKCKVSNKALPAPIEKTISKAKGQPREPQVYTLPPSREEMTKNQVSLTCDVSGFYPSDIAVEWESDGQPENNYKTTPPVLDSDGSFFLYSKLTVDKSRWEQGDVFSCSVMHEALHNHYTQKSLSLSPGK

SEQ ID NO: 36168 - protein, 117 aa, synthetic construct; identical to SEQ ID NO: 33004
  source 1..117: note = Description of Artificial Sequence: Synthetic polypeptide; note = VH of XENP022726

SEQ ID NO: 36169 - protein, 5 aa, synthetic construct
  source 1..5: note = Description of Artificial Sequence: Synthetic peptide; note = XENP022726 vhCDR1
HYGMN

SEQ ID NO: 36170 - protein, 17 aa, synthetic construct
  source 1..17: note = Description of Artificial Sequence: Synthetic peptide; note = XENP022726 vhCDR2
WINTYTGEPTYADKFQG

SEQ ID NO: 36171 - protein, 8 aa, synthetic construct
  source 1..8: note = Description of Artificial Sequence: Synthetic peptide; note = XENP022726 vhCDR3
DYYGSSPY

SEQ ID NO: 36172 - protein, 477 aa, synthetic construct; identical to SEQ ID NO: 21669
  source 1..477: note = Description of Artificial Sequence: Synthetic polypeptide; note = XENP022726 1C11_H1L3_Fab-[CTLA-4]_H3.23_L0.129_scFv scFv-Fc  Heavy Chain

SEQ ID NO: 36173 - protein, 118 aa, synthetic construct; identical to SEQ ID NO: 2632
  source 1..118: note = Description of Artificial Sequence: Synthetic polypeptide; note = VH of XENP022726

SEQ ID NO: 36174 - protein, 108 aa, synthetic construct; identical to SEQ ID NO: 2768
  source 1..108: note = Description of Artificial Sequence: Synthetic polypeptide; note = VL of XENP022726

SEQ ID NO: 36175 - protein, 231 aa, synthetic construct; identical to SEQ ID NO: 21532
  source 1..231: note = Description of Artificial Sequence: Synthetic polypeptide; note = Fc chain of XENP022726

SEQ ID NO: 36176 - protein, 5 aa, synthetic construct
  source 1..5: note = Description of Artificial Sequence: Synthetic peptide; note = XENP022726 vhCDR1
SYTMH

SEQ ID NO: 36177 - protein, 17 aa, synthetic construct
  source 1..17: note = Description of Artificial Sequence: Synthetic peptide; note = XENP022726 vhCDR2
FISYDGNYKYYADSVKG

SEQ ID NO: 36178 - protein, 9 aa, synthetic construct
  source 1..9: note = Description of Artificial Sequence: Synthetic peptide; note = XENP022726 vhCDR3
GGHLGPFDL

SEQ ID NO: 36179 - protein, 12 aa, synthetic construct
  source 1..12: note = Description of Artificial Sequence: Synthetic peptide; note = XENP022726 vlCDR1
RASQSVGSSYLA

SEQ ID NO: 36180 - protein, 7 aa, synthetic construct
  source 1..7: note = Description of Artificial Sequence: Synthetic peptide; note = XENP022726 vlCDR2
GASSRAT

SEQ ID NO: 36181 - protein, 9 aa, synthetic construct
  source 1..9: note = Description of Artificial Sequence: Synthetic peptide; note = XENP022726 vlCDR3
QQYGSSPWT

SEQ ID NO: 36182 - protein, 219 aa, synthetic construct; identical to SEQ ID NO: 33008
  source 1..219: note = Description of Artificial Sequence: Synthetic polypeptide; note = XENP022726 1C11_H1L3_Fab-[CTLA-4]_H3.23_L0.129_scFv Light  Chain

SEQ ID NO: 36183 - protein, 112 aa, synthetic construct; identical to SEQ ID NO: 33009
  source 1..112: note = Description of Artificial Sequence: Synthetic polypeptide; note = VL of XENP022726

SEQ ID NO: 36184 - protein, 16 aa, synthetic construct
  source 1..16: note = Description of Artificial Sequence: Synthetic peptide; note = XENP022726 vlCDR1
KSSQSIVHSNGNTYLE

SEQ ID NO: 36185 - protein, 7 aa, synthetic construct
  source 1..7: note = Description of Artificial Sequence: Synthetic peptide; note = XENP022726 vlCDR2
KVSNRFS

SEQ ID NO: 36186 - protein, 9 aa, synthetic construct
  source 1..9: note = Description of Artificial Sequence: Synthetic peptide; note = XENP022726 vlCDR3
FQGSHVPNT

SEQ ID NO: 36187 - protein, 446 aa, synthetic construct
  source 1..446: note = Description of Artificial Sequence: Synthetic polypeptide; note = XENP022727 1C11_H2L1_Fab-[CTLA-4]_H3.23_L0.129_scFv Fab-Fc  Heavy Chain
EIQLLESGGGLVQPGGSLRLSCAASGYTFTHYGMNWVRQAPGKGLEWVSWINTYTGEPTYADSVKGRFTISLDTSKSTAYLQMNSLRAEDTAVYFCARDYYGSSPYWGQGTLVTVSSASTKGPSVFPLAPSSKSTSGGTAALGCLVKDYFPEPVTVSWNSGALTSGVHTFPAVLQSSGLYSLSSVVTVPSSSLGTQTYICNVNHKPSDTKVDKKVEPKSCDKTHTCPPCPAPPVAGPSVFLFPPKPKDTLMISRTPEVTCVVVDVKHEDPEVKFNWYVDGVEVHNAKTKPREEEYNSTYRVVSVLTVLHQDWLNGKEYKCKVSNKALPAPIEKTISKAKGQPREPQVYTLPPSREEMTKNQVSLTCDVSGFYPSDIAVEWESDGQPENNYKTTPPVLDSDGSFFLYSKLTVDKSRWEQGDVFSCSVMHEALHNHYTQKSLSLSPGK

SEQ ID NO: 36188 - protein, 117 aa, synthetic construct; identical to SEQ ID NO: 33014
  source 1..117: note = Description of Artificial Sequence: Synthetic polypeptide; note = VH of XENP022727

SEQ ID NO: 36189 - protein, 5 aa, synthetic construct
  source 1..5: note = Description of Artificial Sequence: Synthetic peptide; note = XENP022727 vhCDR1
HYGMN

SEQ ID NO: 36190 - protein, 17 aa, synthetic construct
  source 1..17: note = Description of Artificial Sequence: Synthetic peptide; note = XENP022727 vhCDR2
WINTYTGEPTYADSVKG

SEQ ID NO: 36191 - protein, 8 aa, synthetic construct
  source 1..8: note = Description of Artificial Sequence: Synthetic peptide; note = XENP022727 vhCDR3
DYYGSSPY

SEQ ID NO: 36192 - protein, 477 aa, synthetic construct; identical to SEQ ID NO: 21669
  source 1..477: note = Description of Artificial Sequence: Synthetic polypeptide; note = XENP022727 1C11_H2L1_Fab-[CTLA-4]_H3.23_L0.129_scFv scFv-Fc  Heavy Chain

SEQ ID NO: 36193 - protein, 118 aa, synthetic construct; identical to SEQ ID NO: 2632
  source 1..118: note = Description of Artificial Sequence: Synthetic polypeptide; note = VH of XENP022727

SEQ ID NO: 36194 - protein, 108 aa, synthetic construct; identical to SEQ ID NO: 2768
  source 1..108: note = Description of Artificial Sequence: Synthetic polypeptide; note = VL of XENP022727

SEQ ID NO: 36195 - protein, 231 aa, synthetic construct; identical to SEQ ID NO: 21532
  source 1..231: note = Description of Artificial Sequence: Synthetic polypeptide; note = Fc chain of XENP022727

SEQ ID NO: 36196 - protein, 5 aa, synthetic construct
  source 1..5: note = Description of Artificial Sequence: Synthetic peptide; note = XENP022727 vhCDR1
SYTMH

SEQ ID NO: 36197 - protein, 17 aa, synthetic construct
  source 1..17: note = Description of Artificial Sequence: Synthetic peptide; note = XENP022727 vhCDR2
FISYDGNYKYYADSVKG

SEQ ID NO: 36198 - protein, 9 aa, synthetic construct
  source 1..9: note = Description of Artificial Sequence: Synthetic peptide; note = XENP022727 vhCDR3
GGHLGPFDL

SEQ ID NO: 36199 - protein, 12 aa, synthetic construct
  source 1..12: note = Description of Artificial Sequence: Synthetic peptide; note = XENP022727 vlCDR1
RASQSVGSSYLA

SEQ ID NO: 36200 - protein, 7 aa, synthetic construct
  source 1..7: note = Description of Artificial Sequence: Synthetic peptide; note = XENP022727 vlCDR2
GASSRAT

SEQ ID NO: 36201 - protein, 9 aa, synthetic construct
  source 1..9: note = Description of Artificial Sequence: Synthetic peptide; note = XENP022727 vlCDR3
QQYGSSPWT

SEQ ID NO: 36202 - protein, 219 aa, synthetic construct; identical to SEQ ID NO: 33018
  source 1..219: note = Description of Artificial Sequence: Synthetic polypeptide; note = XENP022727 1C11_H2L1_Fab-[CTLA-4]_H3.23_L0.129_scFv Light  Chain

SEQ ID NO: 36203 - protein, 112 aa, synthetic construct; identical to SEQ ID NO: 33019
  source 1..112: note = Description of Artificial Sequence: Synthetic polypeptide; note = VL of XENP022727

SEQ ID NO: 36204 - protein, 16 aa, synthetic construct
  source 1..16: note = Description of Artificial Sequence: Synthetic peptide; note = XENP022727 vlCDR1
RSSQSIVHSNGNTYLE

SEQ ID NO: 36205 - protein, 7 aa, synthetic construct
  source 1..7: note = Description of Artificial Sequence: Synthetic peptide; note = XENP022727 vlCDR2
KVSNRFS

SEQ ID NO: 36206 - protein, 9 aa, synthetic construct
  source 1..9: note = Description of Artificial Sequence: Synthetic peptide; note = XENP022727 vlCDR3
FQGSHVPNT

SEQ ID NO: 36207 - protein, 446 aa, synthetic construct; identical to SEQ ID NO: 36187
  source 1..446: note = Description of Artificial Sequence: Synthetic polypeptide; note = XENP022728 1C11_H2L2_Fab-[CTLA-4]_H3.23_L0.129_scFv Fab-Fc  Heavy Chain

SEQ ID NO: 36208 - protein, 117 aa, synthetic construct; identical to SEQ ID NO: 33014
  source 1..117: note = Description of Artificial Sequence: Synthetic polypeptide; note = VH of XENP022728

SEQ ID NO: 36209 - protein, 5 aa, synthetic construct
  source 1..5: note = Description of Artificial Sequence: Synthetic peptide; note = XENP022728 vhCDR1
HYGMN

SEQ ID NO: 36210 - protein, 17 aa, synthetic construct
  source 1..17: note = Description of Artificial Sequence: Synthetic peptide; note = XENP022728 vhCDR2
WINTYTGEPTYADSVKG

SEQ ID NO: 36211 - protein, 8 aa, synthetic construct
  source 1..8: note = Description of Artificial Sequence: Synthetic peptide; note = XENP022728 vhCDR3
DYYGSSPY

SEQ ID NO: 36212 - protein, 477 aa, synthetic construct; identical to SEQ ID NO: 21669
  source 1..477: note = Description of Artificial Sequence: Synthetic polypeptide; note = XENP022728 1C11_H2L2_Fab-[CTLA-4]_H3.23_L0.129_scFv scFv-Fc  Heavy Chain

SEQ ID NO: 36213 - protein, 118 aa, synthetic construct; identical to SEQ ID NO: 2632
  source 1..118: note = Description of Artificial Sequence: Synthetic polypeptide; note = VH of XENP022728

SEQ ID NO: 36214 - protein, 108 aa, synthetic construct; identical to SEQ ID NO: 2768
  source 1..108: note = Description of Artificial Sequence: Synthetic polypeptide; note = VL of XENP022728

SEQ ID NO: 36215 - protein, 231 aa, synthetic construct; identical to SEQ ID NO: 21532
  source 1..231: note = Description of Artificial Sequence: Synthetic polypeptide; note = Fc chain of XENP022728

SEQ ID NO: 36216 - protein, 5 aa, synthetic construct
  source 1..5: note = Description of Artificial Sequence: Synthetic peptide; note = XENP022728 vhCDR1
SYTMH

SEQ ID NO: 36217 - protein, 17 aa, synthetic construct
  source 1..17: note = Description of Artificial Sequence: Synthetic peptide; note = XENP022728 vhCDR2
FISYDGNYKYYADSVKG

SEQ ID NO: 36218 - protein, 9 aa, synthetic construct
  source 1..9: note = Description of Artificial Sequence: Synthetic peptide; note = XENP022728 vhCDR3
GGHLGPFDL

SEQ ID NO: 36219 - protein, 12 aa, synthetic construct
  source 1..12: note = Description of Artificial Sequence: Synthetic peptide; note = XENP022728 vlCDR1
RASQSVGSSYLA

SEQ ID NO: 36220 - protein, 7 aa, synthetic construct
  source 1..7: note = Description of Artificial Sequence: Synthetic peptide; note = XENP022728 vlCDR2
GASSRAT

SEQ ID NO: 36221 - protein, 9 aa, synthetic construct
  source 1..9: note = Description of Artificial Sequence: Synthetic peptide; note = XENP022728 vlCDR3
QQYGSSPWT

SEQ ID NO: 36222 - protein, 219 aa, synthetic construct; identical to SEQ ID NO: 33028
  source 1..219: note = Description of Artificial Sequence: Synthetic polypeptide; note = XENP022728 1C11_H2L2_Fab-[CTLA-4]_H3.23_L0.129_scFv Light  Chain

SEQ ID NO: 36223 - protein, 112 aa, synthetic construct; identical to SEQ ID NO: 33029
  source 1..112: note = Description of Artificial Sequence: Synthetic polypeptide; note = VL of XENP022728

SEQ ID NO: 36224 - protein, 16 aa, synthetic construct
  source 1..16: note = Description of Artificial Sequence: Synthetic peptide; note = XENP022728 vlCDR1
RSSQSIVHSNGNTYLE

SEQ ID NO: 36225 - protein, 7 aa, synthetic construct
  source 1..7: note = Description of Artificial Sequence: Synthetic peptide; note = XENP022728 vlCDR2
KVSNRFS

SEQ ID NO: 36226 - protein, 9 aa, synthetic construct
  source 1..9: note = Description of Artificial Sequence: Synthetic peptide; note = XENP022728 vlCDR3
FQGSHVPNT

SEQ ID NO: 36227 - protein, 446 aa, synthetic construct
  source 1..446: note = Description of Artificial Sequence: Synthetic polypeptide; note = XENP022729 1C11_H3L3_Fab-[CTLA-4]_H3.23_L0.129_scFv Fab-Fc  Heavy Chain
QIQLVQSGSELKKPGASVKVSCKASGYTFTHYGMNWVRQAPGQGLEWMGWINTYTGEPTYADGFTGRFVFSLDTSVSTAYLQISSLKAEDTAVYFCARDYYGSSPYWGQGTLVTVSSASTKGPSVFPLAPSSKSTSGGTAALGCLVKDYFPEPVTVSWNSGALTSGVHTFPAVLQSSGLYSLSSVVTVPSSSLGTQTYICNVNHKPSDTKVDKKVEPKSCDKTHTCPPCPAPPVAGPSVFLFPPKPKDTLMISRTPEVTCVVVDVKHEDPEVKFNWYVDGVEVHNAKTKPREEEYNSTYRVVSVLTVLHQDWLNGKEYKCKVSNKALPAPIEKTISKAKGQPREPQVYTLPPSREEMTKNQVSLTCDVSGFYPSDIAVEWESDGQPENNYKTTPPVLDSDGSFFLYSKLTVDKSRWEQGDVFSCSVMHEALHNHYTQKSLSLSPGK

SEQ ID NO: 36228 - protein, 117 aa, synthetic construct; identical to SEQ ID NO: 33034
  source 1..117: note = Description of Artificial Sequence: Synthetic polypeptide; note = VH of XENP022729

SEQ ID NO: 36229 - protein, 5 aa, synthetic construct
  source 1..5: note = Description of Artificial Sequence: Synthetic peptide; note = XENP022729 vhCDR1
HYGMN

SEQ ID NO: 36230 - protein, 17 aa, synthetic construct
  source 1..17: note = Description of Artificial Sequence: Synthetic peptide; note = XENP022729 vhCDR2
WINTYTGEPTYADGFTG

SEQ ID NO: 36231 - protein, 8 aa, synthetic construct
  source 1..8: note = Description of Artificial Sequence: Synthetic peptide; note = XENP022729 vhCDR3
DYYGSSPY

SEQ ID NO: 36232 - protein, 477 aa, synthetic construct; identical to SEQ ID NO: 21669
  source 1..477: note = Description of Artificial Sequence: Synthetic polypeptide; note = XENP022729 1C11_H3L3_Fab-[CTLA-4]_H3.23_L0.129_scFv scFv-Fc  Heavy Chain

SEQ ID NO: 36233 - protein, 118 aa, synthetic construct; identical to SEQ ID NO: 2632
  source 1..118: note = Description of Artificial Sequence: Synthetic polypeptide; note = VH of XENP022729

SEQ ID NO: 36234 - protein, 108 aa, synthetic construct; identical to SEQ ID NO: 2768
  source 1..108: note = Description of Artificial Sequence: Synthetic polypeptide; note = VL of XENP022729

SEQ ID NO: 36235 - protein, 231 aa, synthetic construct; identical to SEQ ID NO: 21532
  source 1..231: note = Description of Artificial Sequence: Synthetic polypeptide; note = Fc chain of XENP022729

SEQ ID NO: 36236 - protein, 5 aa, synthetic construct
  source 1..5: note = Description of Artificial Sequence: Synthetic peptide; note = XENP022729 vhCDR1
SYTMH

SEQ ID NO: 36237 - protein, 17 aa, synthetic construct
  source 1..17: note = Description of Artificial Sequence: Synthetic peptide; note = XENP022729 vhCDR2
FISYDGNYKYYADSVKG

SEQ ID NO: 36238 - protein, 9 aa, synthetic construct
  source 1..9: note = Description of Artificial Sequence: Synthetic peptide; note = XENP022729 vhCDR3
GGHLGPFDL

SEQ ID NO: 36239 - protein, 12 aa, synthetic construct
  source 1..12: note = Description of Artificial Sequence: Synthetic peptide; note = XENP022729 vlCDR1
RASQSVGSSYLA

SEQ ID NO: 36240 - protein, 7 aa, synthetic construct
  source 1..7: note = Description of Artificial Sequence: Synthetic peptide; note = XENP022729 vlCDR2
GASSRAT

SEQ ID NO: 36241 - protein, 9 aa, synthetic construct
  source 1..9: note = Description of Artificial Sequence: Synthetic peptide; note = XENP022729 vlCDR3
QQYGSSPWT

SEQ ID NO: 36242 - protein, 219 aa, synthetic construct; identical to SEQ ID NO: 33008
  source 1..219: note = Description of Artificial Sequence: Synthetic polypeptide; note = XENP022729 1C11_H3L3_Fab-[CTLA-4]_H3.23_L0.129_scFv Light  Chain

SEQ ID NO: 36243 - protein, 112 aa, synthetic construct; identical to SEQ ID NO: 33009
  source 1..112: note = Description of Artificial Sequence: Synthetic polypeptide; note = VL of XENP022729

SEQ ID NO: 36244 - protein, 16 aa, synthetic construct
  source 1..16: note = Description of Artificial Sequence: Synthetic peptide; note = XENP022729 vlCDR1
KSSQSIVHSNGNTYLE

SEQ ID NO: 36245 - protein, 7 aa, synthetic construct
  source 1..7: note = Description of Artificial Sequence: Synthetic peptide; note = XENP022729 vlCDR2
KVSNRFS

SEQ ID NO: 36246 - protein, 9 aa, synthetic construct
  source 1..9: note = Description of Artificial Sequence: Synthetic peptide; note = XENP022729 vlCDR3
FQGSHVPNT

SEQ ID NO: 36247 - protein, 449 aa, synthetic construct
  source 1..449: note = Description of Artificial Sequence: Synthetic polypeptide; note = XENP022836 2E9_H1L1_Fab-[CTLA-4]_H3.23_L0.129_scFv HC-Fab
QVQLVQSGAEVKKPGASVKVSCKASGYAFTNYWLGWVRQAPGQGLEWMGNFYPGSSNTYYNEKFQGRVTMTADKSISTAYMELSRLRSDDTAVYFCARHYGTNYRYFDVWGAGTLVTVSSASTKGPSVFPLAPSSKSTSGGTAALGCLVKDYFPEPVTVSWNSGALTSGVHTFPAVLQSSGLYSLSSVVTVPSSSLGTQTYICNVNHKPSDTKVDKKVEPKSCDKTHTCPPCPAPPVAGPSVFLFPPKPKDTLMISRTPEVTCVVVDVKHEDPEVKFNWYVDGVEVHNAKTKPREEEYNSTYRVVSVLTVLHQDWLNGKEYKCKVSNKALPAPIEKTISKAKGQPREPQVYTLPPSREEMTKNQVSLTCDVSGFYPSDIAVEWESDGQPENNYKTTPPVLDSDGSFFLYSKLTVDKSRWEQGDVFSCSVMHEALHNHYTQKSLSLSPGK

SEQ ID NO: 36248 - protein, 120 aa, synthetic construct; identical to SEQ ID NO: 11412
  source 1..120: note = Description of Artificial Sequence: Synthetic polypeptide; note = VH of XENP022836

SEQ ID NO: 36249 - protein, 5 aa, synthetic construct
  source 1..5: note = Description of Artificial Sequence: Synthetic peptide; note = XENP022836 vhCDR1
NYWLG

SEQ ID NO: 36250 - protein, 17 aa, synthetic construct
  source 1..17: note = Description of Artificial Sequence: Synthetic peptide; note = XENP022836 vhCDR2
NFYPGSSNTYYNEKFQG

SEQ ID NO: 36251 - protein, 11 aa, synthetic construct
  source 1..11: note = Description of Artificial Sequence: Synthetic peptide; note = XENP022836 vhCDR3
HYGTNYRYFDV

SEQ ID NO: 36252 - protein, 477 aa, synthetic construct; identical to SEQ ID NO: 21669
  source 1..477: note = Description of Artificial Sequence: Synthetic polypeptide; note = XENP022836 2E9_H1L1_Fab-[CTLA-4]_H3.23_L0.129_scFv HC-scFV

SEQ ID NO: 36253 - protein, 118 aa, synthetic construct; identical to SEQ ID NO: 2632
  source 1..118: note = Description of Artificial Sequence: Synthetic polypeptide; note = VH of XENP022836

SEQ ID NO: 36254 - protein, 108 aa, synthetic construct; identical to SEQ ID NO: 2768
  source 1..108: note = Description of Artificial Sequence: Synthetic polypeptide; note = VL of XENP022836

SEQ ID NO: 36255 - protein, 231 aa, synthetic construct; identical to SEQ ID NO: 21532
  source 1..231: note = Description of Artificial Sequence: Synthetic polypeptide; note = Fc chain of XENP022836

SEQ ID NO: 36256 - protein, 5 aa, synthetic construct
  source 1..5: note = Description of Artificial Sequence: Synthetic peptide; note = XENP022836 vhCDR1
SYTMH

SEQ ID NO: 36257 - protein, 17 aa, synthetic construct
  source 1..17: note = Description of Artificial Sequence: Synthetic peptide; note = XENP022836 vhCDR2
FISYDGNYKYYADSVKG

SEQ ID NO: 36258 - protein, 9 aa, synthetic construct
  source 1..9: note = Description of Artificial Sequence: Synthetic peptide; note = XENP022836 vhCDR3
GGHLGPFDL

SEQ ID NO: 36259 - protein, 12 aa, synthetic construct
  source 1..12: note = Description of Artificial Sequence: Synthetic peptide; note = XENP022836 vlCDR1
RASQSVGSSYLA

SEQ ID NO: 36260 - protein, 7 aa, synthetic construct
  source 1..7: note = Description of Artificial Sequence: Synthetic peptide; note = XENP022836 vlCDR2
GASSRAT

SEQ ID NO: 36261 - protein, 9 aa, synthetic construct
  source 1..9: note = Description of Artificial Sequence: Synthetic peptide; note = XENP022836 vlCDR3
QQYGSSPWT

SEQ ID NO: 36262 - protein, 214 aa, synthetic construct; identical to SEQ ID NO: 17080
  source 1..214: note = Description of Artificial Sequence: Synthetic polypeptide; note = XENP022836 2E9_H1L1_Fab-[CTLA-4]_H3.23_L0.129_scFv Light Chain

SEQ ID NO: 36263 - protein, 107 aa, synthetic construct; identical to SEQ ID NO: 11413
  source 1..107: note = Description of Artificial Sequence: Synthetic polypeptide; note = VL of XENP022836

SEQ ID NO: 36264 - protein, 11 aa, synthetic construct
  source 1..11: note = Description of Artificial Sequence: Synthetic peptide; note = XENP022836 vlCDR1
RASQSVSNDVA

SEQ ID NO: 36265 - protein, 7 aa, synthetic construct
  source 1..7: note = Description of Artificial Sequence: Synthetic peptide; note = XENP022836 vlCDR2
YASNRYT

SEQ ID NO: 36266 - protein, 9 aa, synthetic construct
  source 1..9: note = Description of Artificial Sequence: Synthetic peptide; note = XENP022836 vlCDR3
QQDYSSPYT

SEQ ID NO: 36267 - protein, 446 aa, synthetic construct
  source 1..446: note = Description of Artificial Sequence: Synthetic polypeptide; note = XENP022854 1C11_H3L3_Fab-[CTLA-4]_H3.23_L0.129_[CTLA-4]_scFv Fab-Fc Heavy Chain
QIQLVQSGSELKKPGASVKVSCKASGYTFTHYGMNWVRQAPGQGLEWMGWINTYTGEPTYADGFTGRFVFSLDTSVSTAYLQISSLKAEDTAVYFCARDYYGSSPYWGQGTLVTVSSASTKGPSVFPLAPSSKSTSGGTAALGCLVKDYFPEPVTVSWNSGALTSGVHTFPAVLQSSGLYSLSSVVTVPSSSLGTQTYICNVNHKPSDTKVDKKVEPKSCDKTHTCPPCPAPPVAGPSVFLFPPKPKDTLMISRTPEVTCVVVDVKHEDPEVKFNWYVDGVEVHNAKTKPREEEYNSTYRVVSVLTVLHQDWLNGKEYKCKVSNKALPAPIEKTISKAKGQPREPQVYTLPPSREEMTKNQVSLTCDVSGFYPSDIAVEWESDGQPENNYKTTPPVLDSDGSFFLYSKLTVDKSRWEQGDVFSCSVLHEALHSHYTQKSLSLSPGK

SEQ ID NO: 36268 - protein, 117 aa, synthetic construct; identical to SEQ ID NO: 33034
  source 1..117: note = Description of Artificial Sequence: Synthetic polypeptide; note = VH of XENP022854

SEQ ID NO: 36269 - protein, 5 aa, synthetic construct
  source 1..5: note = Description of Artificial Sequence: Synthetic peptide; note = XENP022854 vhCDR1
HYGMN

SEQ ID NO: 36270 - protein, 17 aa, synthetic construct
  source 1..17: note = Description of Artificial Sequence: Synthetic peptide; note = XENP022854 vhCDR2
WINTYTGEPTYADGFTG

SEQ ID NO: 36271 - protein, 8 aa, synthetic construct
  source 1..8: note = Description of Artificial Sequence: Synthetic peptide; note = XENP022854 vhCDR3
DYYGSSPY

SEQ ID NO: 36272 - protein, 477 aa, synthetic construct; identical to SEQ ID NO: 35612
  source 1..477: note = Description of Artificial Sequence: Synthetic polypeptide; note = XENP022854 1C11_H3L3_Fab-[CTLA-4]_H3.23_L0.129_[CTLA-4]_scFv scFv-Fc Heavy Chain

SEQ ID NO: 36273 - protein, 118 aa, synthetic construct; identical to SEQ ID NO: 2632
  source 1..118: note = Description of Artificial Sequence: Synthetic polypeptide; note = VH of XENP022854

SEQ ID NO: 36274 - protein, 108 aa, synthetic construct; identical to SEQ ID NO: 2768
  source 1..108: note = Description of Artificial Sequence: Synthetic polypeptide; note = VL of XENP022854

SEQ ID NO: 36275 - protein, 231 aa, synthetic construct; identical to SEQ ID NO: 21572
  source 1..231: note = Description of Artificial Sequence: Synthetic polypeptide; note = Fc chain of XENP022854

SEQ ID NO: 36276 - protein, 5 aa, synthetic construct
  source 1..5: note = Description of Artificial Sequence: Synthetic peptide; note = XENP022854 vhCDR1
SYTMH

SEQ ID NO: 36277 - protein, 17 aa, synthetic construct
  source 1..17: note = Description of Artificial Sequence: Synthetic peptide; note = XENP022854 vhCDR2
FISYDGNYKYYADSVKG

SEQ ID NO: 36278 - protein, 9 aa, synthetic construct
  source 1..9: note = Description of Artificial Sequence: Synthetic peptide; note = XENP022854 vhCDR3
GGHLGPFDL

SEQ ID NO: 36279 - protein, 12 aa, synthetic construct
  source 1..12: note = Description of Artificial Sequence: Synthetic peptide; note = XENP022854 vlCDR1
RASQSVGSSYLA

SEQ ID NO: 36280 - protein, 7 aa, synthetic construct
  source 1..7: note = Description of Artificial Sequence: Synthetic peptide; note = XENP022854 vlCDR2
GASSRAT

SEQ ID NO: 36281 - protein, 9 aa, synthetic construct
  source 1..9: note = Description of Artificial Sequence: Synthetic peptide; note = XENP022854 vlCDR3
QQYGSSPWT

SEQ ID NO: 36282 - protein, 219 aa, synthetic construct; identical to SEQ ID NO: 33008
  source 1..219: note = Description of Artificial Sequence: Synthetic polypeptide; note = XENP022854 1C11_H3L3_Fab-[CTLA-4]_H3.23_L0.129_[CTLA-4]_scFv Light Chain

SEQ ID NO: 36283 - protein, 112 aa, synthetic construct; identical to SEQ ID NO: 33009
  source 1..112: note = Description of Artificial Sequence: Synthetic polypeptide; note = VL of XENP022854

SEQ ID NO: 36284 - protein, 16 aa, synthetic construct
  source 1..16: note = Description of Artificial Sequence: Synthetic peptide; note = XENP022854 vlCDR1
KSSQSIVHSNGNTYLE

SEQ ID NO: 36285 - protein, 7 aa, synthetic construct
  source 1..7: note = Description of Artificial Sequence: Synthetic peptide; note = XENP022854 vlCDR2
KVSNRFS

SEQ ID NO: 36286 - protein, 9 aa, synthetic construct
  source 1..9: note = Description of Artificial Sequence: Synthetic peptide; note = XENP022854 vlCDR3
FQGSHVPNT

SEQ ID NO: 36287 - protein, 449 aa, synthetic construct
  source 1..449: note = Description of Artificial Sequence: Synthetic polypeptide; note = XENP022855 2E9_H1L1_Fab-[CTLA-4]_H3.23_L0.129_[CTLA-4]_scFv Fab-Fc Heavy Chain
QVQLVQSGAEVKKPGASVKVSCKASGYAFTNYWLGWVRQAPGQGLEWMGNFYPGSSNTYYNEKFQGRVTMTADKSISTAYMELSRLRSDDTAVYFCARHYGTNYRYFDVWGAGTLVTVSSASTKGPSVFPLAPSSKSTSGGTAALGCLVKDYFPEPVTVSWNSGALTSGVHTFPAVLQSSGLYSLSSVVTVPSSSLGTQTYICNVNHKPSDTKVDKKVEPKSCDKTHTCPPCPAPPVAGPSVFLFPPKPKDTLMISRTPEVTCVVVDVKHEDPEVKFNWYVDGVEVHNAKTKPREEEYNSTYRVVSVLTVLHQDWLNGKEYKCKVSNKALPAPIEKTISKAKGQPREPQVYTLPPSREEMTKNQVSLTCDVSGFYPSDIAVEWESDGQPENNYKTTPPVLDSDGSFFLYSKLTVDKSRWEQGDVFSCSVLHEALHSHYTQKSLSLSPGK

SEQ ID NO: 36288 - protein, 120 aa, synthetic construct; identical to SEQ ID NO: 11412
  source 1..120: note = Description of Artificial Sequence: Synthetic polypeptide; note = VH of XENP022855

SEQ ID NO: 36289 - protein, 5 aa, synthetic construct
  source 1..5: note = Description of Artificial Sequence: Synthetic peptide; note = XENP022855 vhCDR1
NYWLG

SEQ ID NO: 36290 - protein, 17 aa, synthetic construct
  source 1..17: note = Description of Artificial Sequence: Synthetic peptide; note = XENP022855 vhCDR2
NFYPGSSNTYYNEKFQG

SEQ ID NO: 36291 - protein, 11 aa, synthetic construct
  source 1..11: note = Description of Artificial Sequence: Synthetic peptide; note = XENP022855 vhCDR3
HYGTNYRYFDV

SEQ ID NO: 36292 - protein, 477 aa, synthetic construct; identical to SEQ ID NO: 35612
  source 1..477: note = Description of Artificial Sequence: Synthetic polypeptide; note = XENP022855 2E9_H1L1_Fab-[CTLA-4]_H3.23_L0.129_[CTLA-4]_scFv  scFv-Fc Heavy Chain

SEQ ID NO: 36293 - protein, 118 aa, synthetic construct; identical to SEQ ID NO: 2632
  source 1..118: note = Description of Artificial Sequence: Synthetic polypeptide; note = VH of XENP022855

SEQ ID NO: 36294 - protein, 108 aa, synthetic construct; identical to SEQ ID NO: 2768
  source 1..108: note = Description of Artificial Sequence: Synthetic polypeptide; note = VL of XENP022855

SEQ ID NO: 36295 - protein, 231 aa, synthetic construct; identical to SEQ ID NO: 21572
  source 1..231: note = Description of Artificial Sequence: Synthetic polypeptide; note = Fc chain of XENP022855

SEQ ID NO: 36296 - protein, 5 aa, synthetic construct
  source 1..5: note = Description of Artificial Sequence: Synthetic peptide; note = XENP022855 vhCDR1
SYTMH

SEQ ID NO: 36297 - protein, 17 aa, synthetic construct
  source 1..17: note = Description of Artificial Sequence: Synthetic peptide; note = XENP022855 vhCDR2
FISYDGNYKYYADSVKG

SEQ ID NO: 36298 - protein, 9 aa, synthetic construct
  source 1..9: note = Description of Artificial Sequence: Synthetic peptide; note = XENP022855 vhCDR3
GGHLGPFDL

SEQ ID NO: 36299 - protein, 12 aa, synthetic construct
  source 1..12: note = Description of Artificial Sequence: Synthetic peptide; note = XENP022855 vlCDR1
RASQSVGSSYLA

SEQ ID NO: 36300 - protein, 7 aa, synthetic construct
  source 1..7: note = Description of Artificial Sequence: Synthetic peptide; note = XENP022855 vlCDR2
GASSRAT

SEQ ID NO: 36301 - protein, 9 aa, synthetic construct
  source 1..9: note = Description of Artificial Sequence: Synthetic peptide; note = XENP022855 vlCDR3
QQYGSSPWT

SEQ ID NO: 36302 - protein, 214 aa, synthetic construct; identical to SEQ ID NO: 17080
  source 1..214: note = Description of Artificial Sequence: Synthetic polypeptide; note = XENP022855 2E9_H1L1_Fab-[CTLA-4]_H3.23_L0.129_[CTLA-4]_scFv  Light Chain

SEQ ID NO: 36303 - protein, 107 aa, synthetic construct; identical to SEQ ID NO: 11413
  source 1..107: note = Description of Artificial Sequence: Synthetic polypeptide; note = VL of XENP022855

SEQ ID NO: 36304 - protein, 11 aa, synthetic construct
  source 1..11: note = Description of Artificial Sequence: Synthetic peptide; note = XENP022855 vlCDR1
RASQSVSNDVA

SEQ ID NO: 36305 - protein, 7 aa, synthetic construct
  source 1..7: note = Description of Artificial Sequence: Synthetic peptide; note = XENP022855 vlCDR2
YASNRYT

SEQ ID NO: 36306 - protein, 9 aa, synthetic construct
  source 1..9: note = Description of Artificial Sequence: Synthetic peptide; note = XENP022855 vlCDR3
QQDYSSPYT

SEQ ID NO: 36307 - protein, 446 aa, synthetic construct; identical to SEQ ID NO: 36227
  source 1..446: note = Description of Artificial Sequence: Synthetic polypeptide; note = XENP022993 1C11_H3L1_Fab-[CTLA-4]_H3.23_L0.129_scFv Fab-Fc Heavy Chain

SEQ ID NO: 36308 - protein, 117 aa, synthetic construct; identical to SEQ ID NO: 33034
  source 1..117: note = Description of Artificial Sequence: Synthetic polypeptide; note = VH of XENP022993

SEQ ID NO: 36309 - protein, 5 aa, synthetic construct
  source 1..5: note = Description of Artificial Sequence: Synthetic peptide; note = XENP022993 vhCDR1
HYGMN

SEQ ID NO: 36310 - protein, 17 aa, synthetic construct
  source 1..17: note = Description of Artificial Sequence: Synthetic peptide; note = XENP022993 vhCDR2
WINTYTGEPTYADGFTG

SEQ ID NO: 36311 - protein, 8 aa, synthetic construct
  source 1..8: note = Description of Artificial Sequence: Synthetic peptide; note = XENP022993 vhCDR3
DYYGSSPY

SEQ ID NO: 36312 - protein, 477 aa, synthetic construct; identical to SEQ ID NO: 21669
  source 1..477: note = Description of Artificial Sequence: Synthetic polypeptide; note = XENP022993 1C11_H3L1_Fab-[CTLA-4]_H3.23_L0.129_scFv scFv-Fc  Heavy Chain

SEQ ID NO: 36313 - protein, 118 aa, synthetic construct; identical to SEQ ID NO: 2632
  source 1..118: note = Description of Artificial Sequence: Synthetic polypeptide; note = VH of XENP022993

SEQ ID NO: 36314 - protein, 108 aa, synthetic construct; identical to SEQ ID NO: 2768
  source 1..108: note = Description of Artificial Sequence: Synthetic polypeptide; note = VL of XENP022993

SEQ ID NO: 36315 - protein, 231 aa, synthetic construct; identical to SEQ ID NO: 21532
  source 1..231: note = Description of Artificial Sequence: Synthetic polypeptide; note = Fc chain of XENP022993

SEQ ID NO: 36316 - protein, 5 aa, synthetic construct
  source 1..5: note = Description of Artificial Sequence: Synthetic peptide; note = XENP022993 vhCDR1
SYTMH

SEQ ID NO: 36317 - protein, 17 aa, synthetic construct
  source 1..17: note = Description of Artificial Sequence: Synthetic peptide; note = XENP022993 vhCDR2
FISYDGNYKYYADSVKG

SEQ ID NO: 36318 - protein, 9 aa, synthetic construct
  source 1..9: note = Description of Artificial Sequence: Synthetic peptide; note = XENP022993 vhCDR3
GGHLGPFDL

SEQ ID NO: 36319 - protein, 12 aa, synthetic construct
  source 1..12: note = Description of Artificial Sequence: Synthetic peptide; note = XENP022993 vlCDR1
RASQSVGSSYLA

SEQ ID NO: 36320 - protein, 7 aa, synthetic construct
  source 1..7: note = Description of Artificial Sequence: Synthetic peptide; note = XENP022993 vlCDR2
GASSRAT

SEQ ID NO: 36321 - protein, 9 aa, synthetic construct
  source 1..9: note = Description of Artificial Sequence: Synthetic peptide; note = XENP022993 vlCDR3
QQYGSSPWT

SEQ ID NO: 36322 - protein, 219 aa, synthetic construct; identical to SEQ ID NO: 33018
  source 1..219: note = Description of Artificial Sequence: Synthetic polypeptide; note = XENP022993 1C11_H3L1_Fab-[CTLA-4]_H3.23_L0.129_scFv Light  Chain

SEQ ID NO: 36323 - protein, 112 aa, synthetic construct; identical to SEQ ID NO: 33019
  source 1..112: note = Description of Artificial Sequence: Synthetic polypeptide; note = VL of XENP022993

SEQ ID NO: 36324 - protein, 16 aa, synthetic construct
  source 1..16: note = Description of Artificial Sequence: Synthetic peptide; note = XENP022993 vlCDR1
RSSQSIVHSNGNTYLE

SEQ ID NO: 36325 - protein, 7 aa, synthetic construct
  source 1..7: note = Description of Artificial Sequence: Synthetic peptide; note = XENP022993 vlCDR2
KVSNRFS

SEQ ID NO: 36326 - protein, 9 aa, synthetic construct
  source 1..9: note = Description of Artificial Sequence: Synthetic peptide; note = XENP022993 vlCDR3
FQGSHVPNT

SEQ ID NO: 36327 - protein, 446 aa, synthetic construct; identical to SEQ ID NO: 36227
  source 1..446: note = Description of Artificial Sequence: Synthetic polypeptide; note = XENP022994 1C11_H3L2_Fab-[CTLA-4]_H3.23_L0.129_scFv Fab-Fc  Heavy Chain

SEQ ID NO: 36328 - protein, 117 aa, synthetic construct; identical to SEQ ID NO: 33034
  source 1..117: note = Description of Artificial Sequence: Synthetic polypeptide; note = VH of XENP022994

SEQ ID NO: 36329 - protein, 5 aa, synthetic construct
  source 1..5: note = Description of Artificial Sequence: Synthetic peptide; note = XENP022994 vhCDR1
HYGMN

SEQ ID NO: 36330 - protein, 17 aa, synthetic construct
  source 1..17: note = Description of Artificial Sequence: Synthetic peptide; note = XENP022994 vhCDR2
WINTYTGEPTYADGFTG

SEQ ID NO: 36331 - protein, 8 aa, synthetic construct
  source 1..8: note = Description of Artificial Sequence: Synthetic peptide; note = XENP022994 vhCDR3
DYYGSSPY

SEQ ID NO: 36332 - protein, 477 aa, synthetic construct; identical to SEQ ID NO: 21669
  source 1..477: note = Description of Artificial Sequence: Synthetic polypeptide; note = XENP022994 1C11_H3L2_Fab-[CTLA-4]_H3.23_L0.129_scFv scFv-Fc  Heavy Chain

SEQ ID NO: 36333 - protein, 118 aa, synthetic construct; identical to SEQ ID NO: 2632
  source 1..118: note = Description of Artificial Sequence: Synthetic polypeptide; note = VH of XENP022994

SEQ ID NO: 36334 - protein, 108 aa, synthetic construct; identical to SEQ ID NO: 2768
  source 1..108: note = Description of Artificial Sequence: Synthetic polypeptide; note = VL of XENP022994

SEQ ID NO: 36335 - protein, 231 aa, synthetic construct; identical to SEQ ID NO: 21532
  source 1..231: note = Description of Artificial Sequence: Synthetic polypeptide; note = Fc chain of XENP022994

SEQ ID NO: 36336 - protein, 5 aa, synthetic construct
  source 1..5: note = Description of Artificial Sequence: Synthetic peptide; note = XENP022994 vhCDR1
SYTMH

SEQ ID NO: 36337 - protein, 17 aa, synthetic construct
  source 1..17: note = Description of Artificial Sequence: Synthetic peptide; note = XENP022994 vhCDR2
FISYDGNYKYYADSVKG

SEQ ID NO: 36338 - protein, 9 aa, synthetic construct
  source 1..9: note = Description of Artificial Sequence: Synthetic peptide; note = XENP022994 vhCDR3
GGHLGPFDL

SEQ ID NO: 36339 - protein, 12 aa, synthetic construct
  source 1..12: note = Description of Artificial Sequence: Synthetic peptide; note = XENP022994 vlCDR1
RASQSVGSSYLA

SEQ ID NO: 36340 - protein, 7 aa, synthetic construct
  source 1..7: note = Description of Artificial Sequence: Synthetic peptide; note = XENP022994 vlCDR2
GASSRAT

SEQ ID NO: 36341 - protein, 9 aa, synthetic construct
  source 1..9: note = Description of Artificial Sequence: Synthetic peptide; note = XENP022994 vlCDR3
QQYGSSPWT

SEQ ID NO: 36342 - protein, 219 aa, synthetic construct; identical to SEQ ID NO: 33028
  source 1..219: note = Description of Artificial Sequence: Synthetic polypeptide; note = XENP022994 1C11_H3L2_Fab-[CTLA-4]_H3.23_L0.129_scFv Light  Chain

SEQ ID NO: 36343 - protein, 112 aa, synthetic construct; identical to SEQ ID NO: 33029
  source 1..112: note = Description of Artificial Sequence: Synthetic polypeptide; note = VL of XENP022994

SEQ ID NO: 36344 - protein, 16 aa, synthetic construct
  source 1..16: note = Description of Artificial Sequence: Synthetic peptide; note = XENP022994 vlCDR1
RSSQSIVHSNGNTYLE

SEQ ID NO: 36345 - protein, 7 aa, synthetic construct
  source 1..7: note = Description of Artificial Sequence: Synthetic peptide; note = XENP022994 vlCDR2
KVSNRFS

SEQ ID NO: 36346 - protein, 9 aa, synthetic construct
  source 1..9: note = Description of Artificial Sequence: Synthetic peptide; note = XENP022994 vlCDR3
FQGSHVPNT

SEQ ID NO: 36347 - protein, 446 aa, synthetic construct
  source 1..446: note = Description of Artificial Sequence: Synthetic polypeptide; note = XENP020850 1D12_H1L1_IgG1_PVA_/S267K Heavy Chain
QVQLVQSGAEVKKPGASVKVSCKASGYTFTSYTMHWVRQAPGQGLEWMGYLIPSSGYTDYNQKFQGRVTMTADKSTSTAYMELSSLRSEDTAVYYCARGDSVYFDYWGQGTLVTVSSASTKGPSVFPLAPSSKSTSGGTAALGCLVKDYFPEPVTVSWNSGALTSGVHTFPAVLQSSGLYSLSSVVTVPSSSLGTQTYICNVNHKPSNTKVDKKVEPKSCDKTHTCPPCPAPPVAGPSVFLFPPKPKDTLMISRTPEVTCVVVDVKHEDPEVKFNWYVDGVEVHNAKTKPREEQYNSTYRVVSVLTVLHQDWLNGKEYKCKVSNKALPAPIEKTISKAKGQPREPQVYTLPPSREEMTKNQVSLTCLVKGFYPSDIAVEWESNGQPENNYKTTPPVLDSDGSFFLYSKLTVDKSRWQQGNVFSCSVMHEALHNHYTQKSLSLSPGK

SEQ ID NO: 36348 - protein, 117 aa, synthetic construct
  source 1..117: note = Description of Artificial Sequence: Synthetic polypeptide; note = VH of XENP020850
QVQLVQSGAEVKKPGASVKVSCKASGYTFTSYTMHWVRQAPGQGLEWMGYLIPSSGYTDYNQKFQGRVTMTADKSTSTAYMELSSLRSEDTAVYYCARGDSVYFDYWGQGTLVTVSS

SEQ ID NO: 36349 - protein, 5 aa, synthetic construct
  source 1..5: note = Description of Artificial Sequence: Synthetic peptide; note = XENP020850 vhCDR1
SYTMH

SEQ ID NO: 36350 - protein, 17 aa, synthetic construct
  source 1..17: note = Description of Artificial Sequence: Synthetic peptide; note = XENP020850 vhCDR2
YLIPSSGYTDYNQKFQG

SEQ ID NO: 36351 - protein, 8 aa, synthetic construct
  source 1..8: note = Description of Artificial Sequence: Synthetic peptide; note = XENP020850 vhCDR3
GDSVYFDY

SEQ ID NO: 36352 - protein, 218 aa, synthetic construct
  source 1..218: note = Description of Artificial Sequence: Synthetic polypeptide; note = XENP020850 1D12_H1L1_IgG1_PVA_/S267K Light Chain
DIVLTQSPATLSLSPGERATLSCRASESVEYYGTSLMQWYQQKPGQPPRLLIYAASNVESGVPARFSGSGSGTDFTLTISSLEPEDFAVYFCQQSRKVPWTFGGGTKVEIKRTVAAPSVFIFPPSDEQLKSGTASVVCLLNNFYPREAKVQWKVDNALQSGNSQESVTEQDSKDSTYSLSSTLTLSKADYEKHKVYACEVTHQGLSSPVTKSFNRGEC

SEQ ID NO: 36353 - protein, 111 aa, synthetic construct
  source 1..111: note = Description of Artificial Sequence: Synthetic polypeptide; note = VL of XENP020850
DIVLTQSPATLSLSPGERATLSCRASESVEYYGTSLMQWYQQKPGQPPRLLIYAASNVESGVPARFSGSGSGTDFTLTISSLEPEDFAVYFCQQSRKVPWTFGGGTKVEIK

SEQ ID NO: 36354 - protein, 15 aa, synthetic construct
  source 1..15: note = Description of Artificial Sequence: Synthetic peptide; note = XENP020850 vlCDR1
RASESVEYYGTSLMQ

SEQ ID NO: 36355 - protein, 7 aa, synthetic construct
  source 1..7: note = Description of Artificial Sequence: Synthetic peptide; note = XENP020850 vlCDR2
AASNVES

SEQ ID NO: 36356 - protein, 9 aa, synthetic construct
  source 1..9: note = Description of Artificial Sequence: Synthetic peptide; note = XENP020850 vlCDR3
QQSRKVPWT

SEQ ID NO: 36357 - protein, 446 aa, synthetic construct; identical to SEQ ID NO: 36347
  source 1..446: note = Description of Artificial Sequence: Synthetic polypeptide; note = XENP020851 1D12_H1L2_IgG1_PVA_/S267K Heavy Chain

SEQ ID NO: 36358 - protein, 117 aa, synthetic construct; identical to SEQ ID NO: 36348
  source 1..117: note = Description of Artificial Sequence: Synthetic polypeptide; note = VH of XENP020851

SEQ ID NO: 36359 - protein, 5 aa, synthetic construct
  source 1..5: note = Description of Artificial Sequence: Synthetic peptide; note = XENP020851 vhCDR1
SYTMH

SEQ ID NO: 36360 - protein, 17 aa, synthetic construct
  source 1..17: note = Description of Artificial Sequence: Synthetic peptide; note = XENP020851 vhCDR2
YLIPSSGYTDYNQKFQG

SEQ ID NO: 36361 - protein, 8 aa, synthetic construct
  source 1..8: note = Description of Artificial Sequence: Synthetic peptide; note = XENP020851 vhCDR3
GDSVYFDY

SEQ ID NO: 36362 - protein, 218 aa, synthetic construct
  source 1..218: note = Description of Artificial Sequence: Synthetic polypeptide; note = XENP020851 1D12_H1L2_IgG1_PVA_/S267K Light Chain
DIVLTQSPDSLAVSLGERATINCKASESVEYYGTSLMQWYQQKPGQPPKLLIYAASNVESGVPARFSGSGSGTDFTLTISSLQAEDVAVYFCQQSRKVPWTFGGGTKVEIKRTVAAPSVFIFPPSDEQLKSGTASVVCLLNNFYPREAKVQWKVDNALQSGNSQESVTEQDSKDSTYSLSSTLTLSKADYEKHKVYACEVTHQGLSSPVTKSFNRGEC

SEQ ID NO: 36363 - protein, 111 aa, synthetic construct
  source 1..111: note = Description of Artificial Sequence: Synthetic polypeptide; note = VL of XENP020851
DIVLTQSPDSLAVSLGERATINCKASESVEYYGTSLMQWYQQKPGQPPKLLIYAASNVESGVPARFSGSGSGTDFTLTISSLQAEDVAVYFCQQSRKVPWTFGGGTKVEIK

SEQ ID NO: 36364 - protein, 15 aa, synthetic construct
  source 1..15: note = Description of Artificial Sequence: Synthetic peptide; note = XENP020851 vlCDR1
KASESVEYYGTSLMQ

SEQ ID NO: 36365 - protein, 7 aa, synthetic construct
  source 1..7: note = Description of Artificial Sequence: Synthetic peptide; note = XENP020851 vlCDR2
AASNVES

SEQ ID NO: 36366 - protein, 9 aa, synthetic construct
  source 1..9: note = Description of Artificial Sequence: Synthetic peptide; note = XENP020851 vlCDR3
QQSRKVPWT

SEQ ID NO: 36367 - protein, 446 aa, synthetic construct
  source 1..446: note = Description of Artificial Sequence: Synthetic polypeptide; note = XENP020853 3H3_H1L1_IgG1_PVA_/S267K Heavy Chain
QVTLKESGPVLVKPTETLTLTCTVSGFSLNGYGVNWVRQPPGKGLEWLAMIWGDGSTDYNSALKSRLTISKDNSKSQVVLTMTNMDPVDTATYYCARSYYTSDEDYWGQGTLVTVSSASTKGPSVFPLAPSSKSTSGGTAALGCLVKDYFPEPVTVSWNSGALTSGVHTFPAVLQSSGLYSLSSVVTVPSSSLGTQTYICNVNHKPSNTKVDKKVEPKSCDKTHTCPPCPAPPVAGPSVFLFPPKPKDTLMISRTPEVTCVVVDVKHEDPEVKFNWYVDGVEVHNAKTKPREEQYNSTYRVVSVLTVLHQDWLNGKEYKCKVSNKALPAPIEKTISKAKGQPREPQVYTLPPSREEMTKNQVSLTCLVKGFYPSDIAVEWESNGQPENNYKTTPPVLDSDGSFFLYSKLTVDKSRWQQGNVFSCSVMHEALHNHYTQKSLSLSPGK

SEQ ID NO: 36368 - protein, 117 aa, synthetic construct
  source 1..117: note = Description of Artificial Sequence: Synthetic polypeptide; note = VH of XENP020853
QVTLKESGPVLVKPTETLTLTCTVSGFSLNGYGVNWVRQPPGKGLEWLAMIWGDGSTDYNSALKSRLTISKDNSKSQVVLTMTNMDPVDTATYYCARSYYTSDEDYWGQGTLVTVSS

SEQ ID NO: 36369 - protein, 5 aa, synthetic construct
  source 1..5: note = Description of Artificial Sequence: Synthetic peptide; note = XENP020853 vhCDR1
GYGVN

SEQ ID NO: 36370 - protein, 16 aa, synthetic construct
  source 1..16: note = Description of Artificial Sequence: Synthetic peptide; note = XENP020853 vhCDR2
MIWGDGSTDYNSALKS

SEQ ID NO: 36371 - protein, 9 aa, synthetic construct
  source 1..9: note = Description of Artificial Sequence: Synthetic peptide; note = XENP020853 vhCDR3
SYYTSDEDY

SEQ ID NO: 36372 - protein, 219 aa, synthetic construct
  source 1..219: note = Description of Artificial Sequence: Synthetic polypeptide; note = XENP020853 3H3_H1L1_IgG1_PVA_/S267K Light Chain
DIVLTQTPLSLPVTPGEPASISCRSSQSLLNSRTRKNYLAWYLQKPGQSPQLLIYWASTRESGVPDRFTGSGSGTDFTLKISRVEAEDVGVYYCKQSYSLRTFGGGTKVEIKRTVAAPSVFIFPPSDEQLKSGTASVVCLLNNFYPREAKVQWKVDNALQSGNSQESVTEQDSKDSTYSLSSTLTLSKADYEKHKVYACEVTHQGLSSPVTKSFNRGEC

SEQ ID NO: 36373 - protein, 112 aa, synthetic construct
  source 1..112: note = Description of Artificial Sequence: Synthetic polypeptide; note = VL of XENP020853
DIVLTQTPLSLPVTPGEPASISCRSSQSLLNSRTRKNYLAWYLQKPGQSPQLLIYWASTRESGVPDRFTGSGSGTDFTLKISRVEAEDVGVYYCKQSYSLRTFGGGTKVEIK

SEQ ID NO: 36374 - protein, 17 aa, synthetic construct
  source 1..17: note = Description of Artificial Sequence: Synthetic peptide; note = XENP020853 vlCDR1
RSSQSLLNSRTRKNYLA

SEQ ID NO: 36375 - protein, 7 aa, synthetic construct
  source 1..7: note = Description of Artificial Sequence: Synthetic peptide; note = XENP020853 vlCDR2
WASTRES

SEQ ID NO: 36376 - protein, 8 aa, synthetic construct
  source 1..8: note = Description of Artificial Sequence: Synthetic peptide; note = XENP020853 vlCDR3
KQSYSLRT

SEQ ID NO: 36377 - protein, 446 aa, synthetic construct; identical to SEQ ID NO: 36367
  source 1..446: note = Description of Artificial Sequence: Synthetic polypeptide; note = XENP020854 3H3_H1L2_IgG1_PVA_/S267K Heavy Chain

SEQ ID NO: 36378 - protein, 117 aa, synthetic construct; identical to SEQ ID NO: 36368
  source 1..117: note = Description of Artificial Sequence: Synthetic polypeptide; note = VH of XENP020854

SEQ ID NO: 36379 - protein, 5 aa, synthetic construct
  source 1..5: note = Description of Artificial Sequence: Synthetic peptide; note = XENP020854 vhCDR1
GYGVN

SEQ ID NO: 36380 - protein, 16 aa, synthetic construct
  source 1..16: note = Description of Artificial Sequence: Synthetic peptide; note = XENP020854 vhCDR2
MIWGDGSTDYNSALKS

SEQ ID NO: 36381 - protein, 9 aa, synthetic construct
  source 1..9: note = Description of Artificial Sequence: Synthetic peptide; note = XENP020854 vhCDR3
SYYTSDEDY

SEQ ID NO: 36382 - protein, 219 aa, synthetic construct
  source 1..219: note = Description of Artificial Sequence: Synthetic polypeptide; note = XENP020854 3H3_H1L2_IgG1_PVA_/S267K Light Chain
DIVLTQSPDSLAVSLGERATINCKSSQSLLNSRTRKNYLAWYQQKPGQSPKLLIYWASTRESGVPDRFTGSGSGTDFTLTISSLQAEDVAVYYCKQSYSLRTFGGGTKVEIKRTVAAPSVFIFPPSDEQLKSGTASVVCLLNNFYPREAKVQWKVDNALQSGNSQESVTEQDSKDSTYSLSSTLTLSKADYEKHKVYACEVTHQGLSSPVTKSFNRGEC

SEQ ID NO: 36383 - protein, 112 aa, synthetic construct
  source 1..112: note = Description of Artificial Sequence: Synthetic polypeptide; note = VL of XENP020854
DIVLTQSPDSLAVSLGERATINCKSSQSLLNSRTRKNYLAWYQQKPGQSPKLLIYWASTRESGVPDRFTGSGSGTDFTLTISSLQAEDVAVYYCKQSYSLRTFGGGTKVEIK

SEQ ID NO: 36384 - protein, 17 aa, synthetic construct
  source 1..17: note = Description of Artificial Sequence: Synthetic peptide; note = XENP020854 vlCDR1
KSSQSLLNSRTRKNYLA

SEQ ID NO: 36385 - protein, 7 aa, synthetic construct
  source 1..7: note = Description of Artificial Sequence: Synthetic peptide; note = XENP020854 vlCDR2
WASTRES

SEQ ID NO: 36386 - protein, 8 aa, synthetic construct
  source 1..8: note = Description of Artificial Sequence: Synthetic peptide; note = XENP020854 vlCDR3
KQSYSLRT

SEQ ID NO: 36387 - protein, 446 aa, synthetic construct
  source 1..446: note = Description of Artificial Sequence: Synthetic polypeptide; note = XENP020855 3H3_H2L1_IgG1_PVA_/S267K Heavy Chain
QVTLKESGPVLVKPTETLTLTCTVSGFSLNGYGVNWVRQPPGKGLEWLAMIWGDGSTDYNSALKSRLTISKDNSKSQVVLTMTNMDPVDTATYYCARSYYTSDFDYWGQGTLVTVSSASTKGPSVFPLAPSSKSTSGGTAALGCLVKDYFPEPVTVSWNSGALTSGVHTFPAVLQSSGLYSLSSVVTVPSSSLGTQTYICNVNHKPSNTKVDKKVEPKSCDKTHTCPPCPAPPVAGPSVFLFPPKPKDTLMISRTPEVTCVVVDVKHEDPEVKFNWYVDGVEVHNAKTKPREEQYNSTYRVVSVLTVLHQDWLNGKEYKCKVSNKALPAPIEKTISKAKGQPREPQVYTLPPSREEMTKNQVSLTCLVKGFYPSDIAVEWESNGQPENNYKTTPPVLDSDGSFFLYSKLTVDKSRWQQGNVFSCSVMHEALHNHYTQKSLSLSPGK

SEQ ID NO: 36388 - protein, 117 aa, synthetic construct
  source 1..117: note = Description of Artificial Sequence: Synthetic polypeptide; note = VH of XENP020855
QVTLKESGPVLVKPTETLTLTCTVSGFSLNGYGVNWVRQPPGKGLEWLAMIWGDGSTDYNSALKSRLTISKDNSKSQVVLTMTNMDPVDTATYYCARSYYTSDFDYWGQGTLVTVSS

SEQ ID NO: 36389 - protein, 5 aa, synthetic construct
  source 1..5: note = Description of Artificial Sequence: Synthetic peptide; note = XENP020855 vhCDR1
GYGVN

SEQ ID NO: 36390 - protein, 16 aa, synthetic construct
  source 1..16: note = Description of Artificial Sequence: Synthetic peptide; note = XENP020855 vhCDR2
MIWGDGSTDYNSALKS

SEQ ID NO: 36391 - protein, 9 aa, synthetic construct
  source 1..9: note = Description of Artificial Sequence: Synthetic peptide; note = XENP020855 vhCDR3
SYYTSDFDY

SEQ ID NO: 36392 - protein, 219 aa, synthetic construct; identical to SEQ ID NO: 36372
  source 1..219: note = Description of Artificial Sequence: Synthetic polypeptide; note = XENP020855 3H3_H2L1_IgG1_PVA_/S267K Light Chain

SEQ ID NO: 36393 - protein, 112 aa, synthetic construct; identical to SEQ ID NO: 36373
  source 1..112: note = Description of Artificial Sequence: Synthetic polypeptide; note = VL of XENP020855

SEQ ID NO: 36394 - protein, 17 aa, synthetic construct
  source 1..17: note = Description of Artificial Sequence: Synthetic peptide; note = XENP020855 vlCDR1
RSSQSLLNSRTRKNYLA

SEQ ID NO: 36395 - protein, 7 aa, synthetic construct
  source 1..7: note = Description of Artificial Sequence: Synthetic peptide; note = XENP020855 vlCDR2
WASTRES

SEQ ID NO: 36396 - protein, 8 aa, synthetic construct
  source 1..8: note = Description of Artificial Sequence: Synthetic peptide; note = XENP020855 vlCDR3
KQSYSLRT

SEQ ID NO: 36397 - protein, 446 aa, synthetic construct; identical to SEQ ID NO: 36387
  source 1..446: note = Description of Artificial Sequence: Synthetic polypeptide; note = XENP020856 3H3_H2L2_IgG1_PVA_/S267K Heavy Chain

SEQ ID NO: 36398 - protein, 117 aa, synthetic construct; identical to SEQ ID NO: 36388
  source 1..117: note = Description of Artificial Sequence: Synthetic polypeptide; note = VH of XENP020856

SEQ ID NO: 36399 - protein, 5 aa, synthetic construct
  source 1..5: note = Description of Artificial Sequence: Synthetic peptide; note = XENP020856 vhCDR1
GYGVN

SEQ ID NO: 36400 - protein, 16 aa, synthetic construct
  source 1..16: note = Description of Artificial Sequence: Synthetic peptide; note = XENP020856 vhCDR2
MIWGDGSTDYNSALKS

SEQ ID NO: 36401 - protein, 9 aa, synthetic construct
  source 1..9: note = Description of Artificial Sequence: Synthetic peptide; note = XENP020856 vhCDR3
SYYTSDFDY

SEQ ID NO: 36402 - protein, 219 aa, synthetic construct; identical to SEQ ID NO: 36382
  source 1..219: note = Description of Artificial Sequence: Synthetic polypeptide; note = XENP020856 3H3_H2L2_IgG1_PVA_/S267K Light Chain

SEQ ID NO: 36403 - protein, 112 aa, synthetic construct; identical to SEQ ID NO: 36383
  source 1..112: note = Description of Artificial Sequence: Synthetic polypeptide; note = VL of XENP020856

SEQ ID NO: 36404 - protein, 17 aa, synthetic construct
  source 1..17: note = Description of Artificial Sequence: Synthetic peptide; note = XENP020856 vlCDR1
KSSQSLLNSRTRKNYLA

SEQ ID NO: 36405 - protein, 7 aa, synthetic construct
  source 1..7: note = Description of Artificial Sequence: Synthetic peptide; note = XENP020856 vlCDR2
WASTRES

SEQ ID NO: 36406 - protein, 8 aa, synthetic construct
  source 1..8: note = Description of Artificial Sequence: Synthetic peptide; note = XENP020856 vlCDR3
KQSYSLRT

SEQ ID NO: 36407 - protein, 446 aa, synthetic construct
  source 1..446: note = Description of Artificial Sequence: Synthetic polypeptide; note = XENP020857 3H3_H3L1_IgG1_PVA_/S267K Heavy Chain
EVQLLESGGGLVQPGGSLRLSCAVSGFSLNGYGVNWVRQAPGKGLEWVSMIWGDGSTDYNSAVKGRFTISKDNSKSTVYLQMNSLRAEDTAVYYCARSYYTSDEDYWGQGTLVTVSSASTKGPSVFPLAPSSKSTSGGTAALGCLVKDYFPEPVTVSWNSGALTSGVHTFPAVLQSSGLYSLSSVVTVPSSSLGTQTYICNVNHKPSNTKVDKKVEPKSCDKTHTCPPCPAPPVAGPSVFLFPPKPKDTLMISRTPEVTCVVVDVKHEDPEVKFNWYVDGVEVHNAKTKPREEQYNSTYRVVSVLTVLHQDWLNGKEYKCKVSNKALPAPIEKTISKAKGQPREPQVYTLPPSREEMTKNQVSLTCLVKGFYPSDIAVEWESNGQPENNYKTTPPVLDSDGSFFLYSKLTVDKSRWQQGNVFSCSVMHEALHNHYTQKSLSLSPGK

SEQ ID NO: 36408 - protein, 117 aa, synthetic construct
  source 1..117: note = Description of Artificial Sequence: Synthetic polypeptide; note = VH of XENP020857
EVQLLESGGGLVQPGGSLRLSCAVSGFSLNGYGVNWVRQAPGKGLEWVSMIWGDGSTDYNSAVKGRFTISKDNSKSTVYLQMNSLRAEDTAVYYCARSYYTSDEDYWGQGTLVTVSS

SEQ ID NO: 36409 - protein, 5 aa, synthetic construct
  source 1..5: note = Description of Artificial Sequence: Synthetic peptide; note = XENP020857 vhCDR1
GYGVN

SEQ ID NO: 36410 - protein, 16 aa, synthetic construct
  source 1..16: note = Description of Artificial Sequence: Synthetic peptide; note = XENP020857 vhCDR2
MIWGDGSTDYNSAVKG

SEQ ID NO: 36411 - protein, 9 aa, synthetic construct
  source 1..9: note = Description of Artificial Sequence: Synthetic peptide; note = XENP020857 vhCDR3
SYYTSDEDY

SEQ ID NO: 36412 - protein, 219 aa, synthetic construct; identical to SEQ ID NO: 36372
  source 1..219: note = Description of Artificial Sequence: Synthetic polypeptide; note = XENP020857 3H3_H3L1_IgG1_PVA_/S267K Light Chain

SEQ ID NO: 36413 - protein, 112 aa, synthetic construct; identical to SEQ ID NO: 36373
  source 1..112: note = Description of Artificial Sequence: Synthetic polypeptide; note = VL of XENP020857

SEQ ID NO: 36414 - protein, 17 aa, synthetic construct
  source 1..17: note = Description of Artificial Sequence: Synthetic peptide; note = XENP020857 vlCDR1
RSSQSLLNSRTRKNYLA

SEQ ID NO: 36415 - protein, 7 aa, synthetic construct
  source 1..7: note = Description of Artificial Sequence: Synthetic peptide; note = XENP020857 vlCDR2
WASTRES

SEQ ID NO: 36416 - protein, 8 aa, synthetic construct
  source 1..8: note = Description of Artificial Sequence: Synthetic peptide; note = XENP020857 vlCDR3
KQSYSLRT

SEQ ID NO: 36417 - protein, 446 aa, synthetic construct; identical to SEQ ID NO: 36407
  source 1..446: note = Description of Artificial Sequence: Synthetic polypeptide; note = XENP020858 3H3_H3L2_IgG1_PVA_/S267K Heavy Chain

SEQ ID NO: 36418 - protein, 117 aa, synthetic construct; identical to SEQ ID NO: 36408
  source 1..117: note = Description of Artificial Sequence: Synthetic polypeptide; note = VH of XENP020858

SEQ ID NO: 36419 - protein, 5 aa, synthetic construct
  source 1..5: note = Description of Artificial Sequence: Synthetic peptide; note = XENP020858 vhCDR1
GYGVN

SEQ ID NO: 36420 - protein, 16 aa, synthetic construct
  source 1..16: note = Description of Artificial Sequence: Synthetic peptide; note = XENP020858 vhCDR2
MIWGDGSTDYNSAVKG

SEQ ID NO: 36421 - protein, 9 aa, synthetic construct
  source 1..9: note = Description of Artificial Sequence: Synthetic peptide; note = XENP020858 vhCDR3
SYYTSDEDY

SEQ ID NO: 36422 - protein, 219 aa, synthetic construct; identical to SEQ ID NO: 36382
  source 1..219: note = Description of Artificial Sequence: Synthetic polypeptide; note = XENP020858 3H3_H3L2_IgG1_PVA_/S267K Light Chain

SEQ ID NO: 36423 - protein, 112 aa, synthetic construct; identical to SEQ ID NO: 36383
  source 1..112: note = Description of Artificial Sequence: Synthetic polypeptide; note = VL of XENP020858

SEQ ID NO: 36424 - protein, 17 aa, synthetic construct
  source 1..17: note = Description of Artificial Sequence: Synthetic peptide; note = XENP020858 vlCDR1
KSSQSLLNSRTRKNYLA

SEQ ID NO: 36425 - protein, 7 aa, synthetic construct
  source 1..7: note = Description of Artificial Sequence: Synthetic peptide; note = XENP020858 vlCDR2
WASTRES

SEQ ID NO: 36426 - protein, 8 aa, synthetic construct
  source 1..8: note = Description of Artificial Sequence: Synthetic peptide; note = XENP020858 vlCDR3
KQSYSLRT

SEQ ID NO: 36427 - protein, 446 aa, synthetic construct
  source 1..446: note = Description of Artificial Sequence: Synthetic polypeptide; note = XENP020859 3H3_H4L1_IgG1_PVA_/S267K Heavy Chain
QVQLQESGPGLVKPSETLSLTCTVSGFSLNGYGVNWVRQPPGKGLEWIGMIWGDGSTDYNPSLKSRVTISKDNSKSQVSLKLSSVTAADTAVYYCARSYYTSDEDYWGQGTLVTVSSASTKGPSVFPLAPSSKSTSGGTAALGCLVKDYFPEPVTVSWNSGALTSGVHTFPAVLQSSGLYSLSSVVTVPSSSLGTQTYICNVNHKPSNTKVDKKVEPKSCDKTHTCPPCPAPPVAGPSVFLFPPKPKDTLMISRTPEVTCVVVDVKHEDPEVKFNWYVDGVEVHNAKTKPREEQYNSTYRVVSVLTVLHQDWLNGKEYKCKVSNKALPAPIEKTISKAKGQPREPQVYTLPPSREEMTKNQVSLTCLVKGFYPSDIAVEWESNGQPENNYKTTPPVLDSDGSFFLYSKLTVDKSRWQQGNVFSCSVMHEALHNHYTQKSLSLSPGK

SEQ ID NO: 36428 - protein, 117 aa, synthetic construct
  source 1..117: note = Description of Artificial Sequence: Synthetic polypeptide; note = VH of XENP020859
QVQLQESGPGLVKPSETLSLTCTVSGFSLNGYGVNWVRQPPGKGLEWIGMIWGDGSTDYNPSLKSRVTISKDNSKSQVSLKLSSVTAADTAVYYCARSYYTSDEDYWGQGTLVTVSS

SEQ ID NO: 36429 - protein, 5 aa, synthetic construct
  source 1..5: note = Description of Artificial Sequence: Synthetic peptide; note = XENP020859 vhCDR1
GYGVN

SEQ ID NO: 36430 - protein, 16 aa, synthetic construct
  source 1..16: note = Description of Artificial Sequence: Synthetic peptide; note = XENP020859 vhCDR2
MIWGDGSTDYNPSLKS

SEQ ID NO: 36431 - protein, 9 aa, synthetic construct
  source 1..9: note = Description of Artificial Sequence: Synthetic peptide; note = XENP020859 vhCDR3
SYYTSDEDY

SEQ ID NO: 36432 - protein, 219 aa, synthetic construct; identical to SEQ ID NO: 36372
  source 1..219: note = Description of Artificial Sequence: Synthetic polypeptide; note = XENP020859 3H3_H4L1_IgG1_PVA_/S267K Light Chain

SEQ ID NO: 36433 - protein, 112 aa, synthetic construct; identical to SEQ ID NO: 36373
  source 1..112: note = Description of Artificial Sequence: Synthetic polypeptide; note = VL of XENP020859

SEQ ID NO: 36434 - protein, 17 aa, synthetic construct
  source 1..17: note = Description of Artificial Sequence: Synthetic peptide; note = XENP020859 vlCDR1
RSSQSLLNSRTRKNYLA

SEQ ID NO: 36435 - protein, 7 aa, synthetic construct
  source 1..7: note = Description of Artificial Sequence: Synthetic peptide; note = XENP020859 vlCDR2
WASTRES

SEQ ID NO: 36436 - protein, 8 aa, synthetic construct
  source 1..8: note = Description of Artificial Sequence: Synthetic peptide; note = XENP020859 vlCDR3
KQSYSLRT

SEQ ID NO: 36437 - protein, 446 aa, synthetic construct; identical to SEQ ID NO: 36427
  source 1..446: note = Description of Artificial Sequence: Synthetic polypeptide; note = XENP020860 3H3_H4L2_IgG1_PVA_/S267K Heavy Chain

SEQ ID NO: 36438 - protein, 117 aa, synthetic construct; identical to SEQ ID NO: 36428
  source 1..117: note = Description of Artificial Sequence: Synthetic polypeptide; note = VH of XENP020860

SEQ ID NO: 36439 - protein, 5 aa, synthetic construct
  source 1..5: note = Description of Artificial Sequence: Synthetic peptide; note = XENP020860 vhCDR1
GYGVN

SEQ ID NO: 36440 - protein, 16 aa, synthetic construct
  source 1..16: note = Description of Artificial Sequence: Synthetic peptide; note = XENP020860 vhCDR2
MIWGDGSTDYNPSLKS

SEQ ID NO: 36441 - protein, 9 aa, synthetic construct
  source 1..9: note = Description of Artificial Sequence: Synthetic peptide; note = XENP020860 vhCDR3
SYYTSDEDY

SEQ ID NO: 36442 - protein, 219 aa, synthetic construct; identical to SEQ ID NO: 36382
  source 1..219: note = Description of Artificial Sequence: Synthetic polypeptide; note = XENP020860 3H3_H4L2_IgG1_PVA_/S267K Light Chain

SEQ ID NO: 36443 - protein, 112 aa, synthetic construct; identical to SEQ ID NO: 36383
  source 1..112: note = Description of Artificial Sequence: Synthetic polypeptide; note = VL of XENP020860

SEQ ID NO: 36444 - protein, 17 aa, synthetic construct
  source 1..17: note = Description of Artificial Sequence: Synthetic peptide; note = XENP020860 vlCDR1
KSSQSLLNSRTRKNYLA

SEQ ID NO: 36445 - protein, 7 aa, synthetic construct
  source 1..7: note = Description of Artificial Sequence: Synthetic peptide; note = XENP020860 vlCDR2
WASTRES

SEQ ID NO: 36446 - protein, 8 aa, synthetic construct
  source 1..8: note = Description of Artificial Sequence: Synthetic peptide; note = XENP020860 vlCDR3
KQSYSLRT

SEQ ID NO: 36447 - protein, 447 aa, synthetic construct
  source 1..447: note = Description of Artificial Sequence: Synthetic polypeptide; note = XENP020861 7B11_H1L1_IgG1_PVA_/S267K Heavy Chain
QVQLVQSGAEVKKPGASVKVSCKVSGFSLTSYAVNWVRQAPGQGLEWMGVIWSGGSTDYNAKFQGRVTMTKDNSKSTVYMELSSLRSEDTAVYYCVSLYYRYDGFDYWGQGTLVTVSSASTKGPSVFPLAPSSKSTSGGTAALGCLVKDYFPEPVTVSWNSGALTSGVHTFPAVLQSSGLYSLSSVVTVPSSSLGTQTYICNVNHKPSNTKVDKKVEPKSCDKTHTCPPCPAPPVAGPSVFLFPPKPKDTLMISRTPEVTCVVVDVKHEDPEVKFNWYVDGVEVHNAKTKPREEQYNSTYRVVSVLTVLHQDWLNGKEYKCKVSNKALPAPIEKTISKAKGQPREPQVYTLPPSREEMTKNQVSLTCLVKGFYPSDIAVEWESNGQPENNYKTTPPVLDSDGSFFLYSKLTVDKSRWQQGNVFSCSVMHEALHNHYTQKSLSLSPGK

SEQ ID NO: 36448 - protein, 118 aa, synthetic construct
  source 1..118: note = Description of Artificial Sequence: Synthetic polypeptide; note = VH of XENP020861
QVQLVQSGAEVKKPGASVKVSCKVSGFSLTSYAVNWVRQAPGQGLEWMGVIWSGGSTDYNAKFQGRVTMTKDNSKSTVYMELSSLRSEDTAVYYCVSLYYRYDGFDYWGQGTLVTVSS

SEQ ID NO: 36449 - protein, 5 aa, synthetic construct
  source 1..5: note = Description of Artificial Sequence: Synthetic peptide; note = XENP020861 vhCDR1
SYAVN

SEQ ID NO: 36450 - protein, 16 aa, synthetic construct
  source 1..16: note = Description of Artificial Sequence: Synthetic peptide; note = XENP020861 vhCDR2
VIWSGGSTDYNAKFQG

SEQ ID NO: 36451 - protein, 10 aa, synthetic construct
  source 1..10: note = Description of Artificial Sequence: Synthetic peptide; note = XENP020861 vhCDR3
LYYRYDGFDY

SEQ ID NO: 36452 - protein, 214 aa, synthetic construct
  source 1..214: note = Description of Artificial Sequence: Synthetic polypeptide; note = XENP020861 7B11_H1L1_IgG1_PVA_/S267K Light Chain
DIVLTQSPSSLSASVGDRVTITCRASQNVGTHVARYQQKPGKSPKALVYSASYRYSGVPDRFTGSGSGTDFTLTISSLQPEDFATYFCQQYNSYPLTFGGGTKVEIKRTVAAPSVFIFPPSDEQLKSGTASVVCLLNNFYPREAKVQWKVDNALQSGNSQESVTEQDSKDSTYSLSSTLTLSKADYEKHKVYACEVTHQGLSSPVTKSFNRGEC

SEQ ID NO: 36453 - protein, 107 aa, synthetic construct
  source 1..107: note = Description of Artificial Sequence: Synthetic polypeptide; note = VL of XENP020861
DIVLTQSPSSLSASVGDRVTITCRASQNVGTHVARYQQKPGKSPKALVYSASYRYSGVPDRFTGSGSGTDFTLTISSLQPEDFATYFCQQYNSYPLTFGGGTKVEIK

SEQ ID NO: 36454 - protein, 11 aa, synthetic construct
  source 1..11: note = Description of Artificial Sequence: Synthetic peptide; note = XENP020861 vlCDR1
RASQNVGTHVA

SEQ ID NO: 36455 - protein, 7 aa, synthetic construct
  source 1..7: note = Description of Artificial Sequence: Synthetic peptide; note = XENP020861 vlCDR2
SASYRYS

SEQ ID NO: 36456 - protein, 9 aa, synthetic construct
  source 1..9: note = Description of Artificial Sequence: Synthetic peptide; note = XENP020861 vlCDR3
QQYNSYPLT

SEQ ID NO: 36457 - protein, 447 aa, synthetic construct; identical to SEQ ID NO: 36447
  source 1..447: note = Description of Artificial Sequence: Synthetic polypeptide; note = XENP020862 7B11_H1L2_IgG1_PVA_/S267K Heavy Chain

SEQ ID NO: 36458 - protein, 118 aa, synthetic construct; identical to SEQ ID NO: 36448
  source 1..118: note = Description of Artificial Sequence: Synthetic polypeptide; note = VH of XENP020862

SEQ ID NO: 36459 - protein, 5 aa, synthetic construct
  source 1..5: note = Description of Artificial Sequence: Synthetic peptide; note = XENP020862 vhCDR1
SYAVN

SEQ ID NO: 36460 - protein, 16 aa, synthetic construct
  source 1..16: note = Description of Artificial Sequence: Synthetic peptide; note = XENP020862 vhCDR2
VIWSGGSTDYNAKFQG

SEQ ID NO: 36461 - protein, 10 aa, synthetic construct
  source 1..10: note = Description of Artificial Sequence: Synthetic peptide; note = XENP020862 vhCDR3
LYYRYDGFDY

SEQ ID NO: 36462 - protein, 214 aa, synthetic construct
  source 1..214: note = Description of Artificial Sequence: Synthetic polypeptide; note = XENP020862 7B11_H1L2_IgG1_PVA_/S267K Light Chain
DIVLTQSPDSLAVSLGERATINCKASQNVGTHVARYQQKPGQSPKALVYSASYRYSGVPDRFTGSGSGTDFTLTISSLQAEDVAVYFCQQYNSYPLTFGGGTKVEIKRTVAAPSVFIFPPSDEQLKSGTASVVCLLNNFYPREAKVQWKVDNALQSGNSQESVTEQDSKDSTYSLSSTLTLSKADYEKHKVYACEVTHQGLSSPVTKSFNRGEC

SEQ ID NO: 36463 - protein, 107 aa, synthetic construct
  source 1..107: note = Description of Artificial Sequence: Synthetic polypeptide; note = VL of XENP020862
DIVLTQSPDSLAVSLGERATINCKASQNVGTHVARYQQKPGQSPKALVYSASYRYSGVPDRFTGSGSGTDFTLTISSLQAEDVAVYFCQQYNSYPLTFGGGTKVEIK

SEQ ID NO: 36464 - protein, 11 aa, synthetic construct
  source 1..11: note = Description of Artificial Sequence: Synthetic peptide; note = XENP020862 vlCDR1
KASQNVGTHVA

SEQ ID NO: 36465 - protein, 7 aa, synthetic construct
  source 1..7: note = Description of Artificial Sequence: Synthetic peptide; note = XENP020862 vlCDR2
SASYRYS

SEQ ID NO: 36466 - protein, 9 aa, synthetic construct
  source 1..9: note = Description of Artificial Sequence: Synthetic peptide; note = XENP020862 vlCDR3
QQYNSYPLT

SEQ ID NO: 36467 - protein, 447 aa, synthetic construct
  source 1..447: note = Description of Artificial Sequence: Synthetic polypeptide; note = XENP020863 7B11_H2L1_IgG1_PVA_/S267K Heavy Chain
EVQLVESGGGLVQPGGSLRLSCAVSGFSLTSYAVNWVRQAPGKGLEWVSVIWSGGSTDYNPSVKGRFTISKDNSKSTVYLQLNSLRAEDTAVYYCVSLYYRYDGFDYWGQGTLVTVSSASTKGPSVFPLAPSSKSTSGGTAALGCLVKDYFPEPVTVSWNSGALTSGVHTFPAVLQSSGLYSLSSVVTVPSSSLGTQTYICNVNHKPSNTKVDKKVEPKSCDKTHTCPPCPAPPVAGPSVFLFPPKPKDTLMISRTPEVTCVVVDVKHEDPEVKFNWYVDGVEVHNAKTKPREEQYNSTYRVVSVLTVLHQDWLNGKEYKCKVSNKALPAPIEKTISKAKGQPREPQVYTLPPSREEMTKNQVSLTCLVKGFYPSDIAVEWESNGQPENNYKTTPPVLDSDGSFFLYSKLTVDKSRWQQGNVFSCSVMHEALHNHYTQKSLSLSPGK

SEQ ID NO: 36468 - protein, 118 aa, synthetic construct
  source 1..118: note = Description of Artificial Sequence: Synthetic polypeptide; note = VH of XENP020863
EVQLVESGGGLVQPGGSLRLSCAVSGFSLTSYAVNWVRQAPGKGLEWVSVIWSGGSTDYNPSVKGRFTISKDNSKSTVYLQLNSLRAEDTAVYYCVSLYYRYDGFDYWGQGTLVTVSS

SEQ ID NO: 36469 - protein, 5 aa, synthetic construct
  source 1..5: note = Description of Artificial Sequence: Synthetic peptide; note = XENP020863 vhCDR1
SYAVN

SEQ ID NO: 36470 - protein, 16 aa, synthetic construct
  source 1..16: note = Description of Artificial Sequence: Synthetic peptide; note = XENP020863 vhCDR2
VIWSGGSTDYNPSVKG

SEQ ID NO: 36471 - protein, 10 aa, synthetic construct
  source 1..10: note = Description of Artificial Sequence: Synthetic peptide; note = XENP020863 vhCDR3
LYYRYDGFDY

SEQ ID NO: 36472 - protein, 214 aa, synthetic construct; identical to SEQ ID NO: 36452
  source 1..214: note = Description of Artificial Sequence: Synthetic polypeptide; note = XENP020863 7B11_H2L1_IgG1_PVA_/S267K Light Chain

SEQ ID NO: 36473 - protein, 107 aa, synthetic construct; identical to SEQ ID NO: 36453
  source 1..107: note = Description of Artificial Sequence: Synthetic polypeptide; note = VL of XENP020863

SEQ ID NO: 36474 - protein, 11 aa, synthetic construct
  source 1..11: note = Description of Artificial Sequence: Synthetic peptide; note = XENP020863 vlCDR1
RASQNVGTHVA

SEQ ID NO: 36475 - protein, 7 aa, synthetic construct
  source 1..7: note = Description of Artificial Sequence: Synthetic peptide; note = XENP020863 vlCDR2
SASYRYS

SEQ ID NO: 36476 - protein, 9 aa, synthetic construct
  source 1..9: note = Description of Artificial Sequence: Synthetic peptide; note = XENP020863 vlCDR3
QQYNSYPLT

SEQ ID NO: 36477 - protein, 447 aa, synthetic construct; identical to SEQ ID NO: 36467
  source 1..447: note = Description of Artificial Sequence: Synthetic polypeptide; note = XENP020864 7B11_H2L2_IgG1_PVA_/S267K Heavy Chain

SEQ ID NO: 36478 - protein, 118 aa, synthetic construct; identical to SEQ ID NO: 36468
  source 1..118: note = Description of Artificial Sequence: Synthetic polypeptide; note = VH of XENP020864

SEQ ID NO: 36479 - protein, 5 aa, synthetic construct
  source 1..5: note = Description of Artificial Sequence: Synthetic peptide; note = XENP020864 vhCDR1
SYAVN

SEQ ID NO: 36480 - protein, 16 aa, synthetic construct
  source 1..16: note = Description of Artificial Sequence: Synthetic peptide; note = XENP020864 vhCDR2
VIWSGGSTDYNPSVKG

SEQ ID NO: 36481 - protein, 10 aa, synthetic construct
  source 1..10: note = Description of Artificial Sequence: Synthetic peptide; note = XENP020864 vhCDR3
LYYRYDGFDY

SEQ ID NO: 36482 - protein, 214 aa, synthetic construct; identical to SEQ ID NO: 36462
  source 1..214: note = Description of Artificial Sequence: Synthetic polypeptide; note = XENP020864 7B11_H2L2_IgG1_PVA_/S267K Light Chain

SEQ ID NO: 36483 - protein, 107 aa, synthetic construct; identical to SEQ ID NO: 36463
  source 1..107: note = Description of Artificial Sequence: Synthetic polypeptide; note = VL of XENP020864

SEQ ID NO: 36484 - protein, 11 aa, synthetic construct
  source 1..11: note = Description of Artificial Sequence: Synthetic peptide; note = XENP020864 vlCDR1
KASQNVGTHVA

SEQ ID NO: 36485 - protein, 7 aa, synthetic construct
  source 1..7: note = Description of Artificial Sequence: Synthetic peptide; note = XENP020864 vlCDR2
SASYRYS

SEQ ID NO: 36486 - protein, 9 aa, synthetic construct
  source 1..9: note = Description of Artificial Sequence: Synthetic peptide; note = XENP020864 vlCDR3
QQYNSYPLT

SEQ ID NO: 36487 - protein, 446 aa, synthetic construct
  source 1..446: note = Description of Artificial Sequence: Synthetic polypeptide; note = XENP020865 7C2_H1L1_IgG1_PVA_/S267K Heavy Chain
EVQVLESGGGLVQPGGSLRLSCAASGFTFSRYAVSWVRQAPGKRLEWVSSISSGGSTYYPDSVKGRFTISRDNSKNTLYLQLNSLRAEDTAVYYCARGDYEGYFDYWGQGTLVTVSSASTKGPSVFPLAPSSKSTSGGTAALGCLVKDYFPEPVTVSWNSGALTSGVHTFPAVLQSSGLYSLSSVVTVPSSSLGTQTYICNVNHKPSNTKVDKKVEPKSCDKTHTCPPCPAPPVAGPSVFLFPPKPKDTLMISRTPEVTCVVVDVKHEDPEVKFNWYVDGVEVHNAKTKPREEQYNSTYRVVSVLTVLHQDWLNGKEYKCKVSNKALPAPIEKTISKAKGQPREPQVYTLPPSREEMTKNQVSLTCLVKGFYPSDIAVEWESNGQPENNYKTTPPVLDSDGSFFLYSKLTVDKSRWQQGNVFSCSVMHEALHNHYTQKSLSLSPGK

SEQ ID NO: 36488 - protein, 117 aa, synthetic construct
  source 1..117: note = Description of Artificial Sequence: Synthetic polypeptide; note = VH of XENP020865
EVQVLESGGGLVQPGGSLRLSCAASGFTFSRYAVSWVRQAPGKRLEWVSSISSGGSTYYPDSVKGRFTISRDNSKNTLYLQLNSLRAEDTAVYYCARGDYEGYFDYWGQGTLVTVSS

SEQ ID NO: 36489 - protein, 5 aa, synthetic construct
  source 1..5: note = Description of Artificial Sequence: Synthetic peptide; note = XENP020865 vhCDR1
RYAVS

SEQ ID NO: 36490 - protein, 16 aa, synthetic construct
  source 1..16: note = Description of Artificial Sequence: Synthetic peptide; note = XENP020865 vhCDR2
SISSGGSTYYPDSVKG

SEQ ID NO: 36491 - protein, 9 aa, synthetic construct
  source 1..9: note = Description of Artificial Sequence: Synthetic peptide; note = XENP020865 vhCDR3
GDYEGYFDY

SEQ ID NO: 36492 - protein, 220 aa, synthetic construct
  source 1..220: note = Description of Artificial Sequence: Synthetic polypeptide; note = XENP020865 7C2_H1L1_IgG1_PVA_/S267K Light Chain
DIVLTQSPDSLAVSLGERATINCKSSQSLLNSINQKNYLAGYQQKPGQSPKLLVYFASTRESGVPDRFIGSGSGTDFTLTISSLQAEDVAVYFCQQHYSTPLTFGAGTKLEIKRTVAAPSVFIFPPSDEQLKSGTASVVCLLNNFYPREAKVQWKVDNALQSGNSQESVTEQDSKDSTYSLSSTLTLSKADYEKHKVYACEVTHQGLSSPVTKSFNRGEC

SEQ ID NO: 36493 - protein, 113 aa, synthetic construct
  source 1..113: note = Description of Artificial Sequence: Synthetic polypeptide; note = VL of XENP020865
DIVLTQSPDSLAVSLGERATINCKSSQSLLNSINQKNYLAGYQQKPGQSPKLLVYFASTRESGVPDRFIGSGSGTDFTLTISSLQAEDVAVYFCQQHYSTPLTFGAGTKLEIK

SEQ ID NO: 36494 - protein, 17 aa, synthetic construct
  source 1..17: note = Description of Artificial Sequence: Synthetic peptide; note = XENP020865 vlCDR1
KSSQSLLNSINQKNYLA

SEQ ID NO: 36495 - protein, 7 aa, synthetic construct
  source 1..7: note = Description of Artificial Sequence: Synthetic peptide; note = XENP020865 vlCDR2
FASTRES

SEQ ID NO: 36496 - protein, 9 aa, synthetic construct
  source 1..9: note = Description of Artificial Sequence: Synthetic peptide; note = XENP020865 vlCDR3
QQHYSTPLT

SEQ ID NO: 36497 - protein, 446 aa, synthetic construct; identical to SEQ ID NO: 36367
  source 1..446: note = Description of Artificial Sequence: Synthetic polypeptide; note = XENP021188 3H3_H1_L1.1_IgG1_PVA_/S267K Heavy Chain

SEQ ID NO: 36498 - protein, 117 aa, synthetic construct; identical to SEQ ID NO: 36368
  source 1..117: note = Description of Artificial Sequence: Synthetic polypeptide; note = VH of XENP021188

SEQ ID NO: 36499 - protein, 5 aa, synthetic construct
  source 1..5: note = Description of Artificial Sequence: Synthetic peptide; note = XENP021188 vhCDR1
GYGVN

SEQ ID NO: 36500 - protein, 16 aa, synthetic construct
  source 1..16: note = Description of Artificial Sequence: Synthetic peptide; note = XENP021188 vhCDR2
MIWGDGSTDYNSALKS

SEQ ID NO: 36501 - protein, 9 aa, synthetic construct
  source 1..9: note = Description of Artificial Sequence: Synthetic peptide; note = XENP021188 vhCDR3
SYYTSDEDY

SEQ ID NO: 36502 - protein, 219 aa, synthetic construct
  source 1..219: note = Description of Artificial Sequence: Synthetic polypeptide; note = XENP021188 3H3_H1_L1.1_IgG1_PVA_/S267K Light Chain
DIVMTQTPLSLPVTPGEPASISCRSSQSLLNSRTRKNYLAWYLQKPGQSPQLLIYWASTRESGVPDRFTGSGSGTDFTLKISRVEAEDVGVYYCKQSYSLRTFGGGTKVEIKRTVAAPSVFIFPPSDEQLKSGTASVVCLLNNFYPREAKVQWKVDNALQSGNSQESVTEQDSKDSTYSLSSTLTLSKADYEKHKVYACEVTHQGLSSPVTKSFNRGEC

SEQ ID NO: 36503 - protein, 112 aa, synthetic construct
  source 1..112: note = Description of Artificial Sequence: Synthetic polypeptide; note = VL of XENP021188
DIVMTQTPLSLPVTPGEPASISCRSSQSLLNSRTRKNYLAWYLQKPGQSPQLLIYWASTRESGVPDRFTGSGSGTDFTLKISRVEAEDVGVYYCKQSYSLRTFGGGTKVEIK

SEQ ID NO: 36504 - protein, 17 aa, synthetic construct
  source 1..17: note = Description of Artificial Sequence: Synthetic peptide; note = XENP021188 vlCDR1
RSSQSLLNSRTRKNYLA

SEQ ID NO: 36505 - protein, 7 aa, synthetic construct
  source 1..7: note = Description of Artificial Sequence: Synthetic peptide; note = XENP021188 vlCDR2
WASTRES

SEQ ID NO: 36506 - protein, 8 aa, synthetic construct
  source 1..8: note = Description of Artificial Sequence: Synthetic peptide; note = XENP021188 vlCDR3
KQSYSLRT

SEQ ID NO: 36507 - protein, 446 aa, synthetic construct; identical to SEQ ID NO: 36367
  source 1..446: note = Description of Artificial Sequence: Synthetic polypeptide; note = XENP021189 3H3_H1_L2.1_IgG1_PVA_/S267K Heavy Chain

SEQ ID NO: 36508 - protein, 117 aa, synthetic construct; identical to SEQ ID NO: 36368
  source 1..117: note = Description of Artificial Sequence: Synthetic polypeptide; note = VH of XENP021189

SEQ ID NO: 36509 - protein, 5 aa, synthetic construct
  source 1..5: note = Description of Artificial Sequence: Synthetic peptide; note = XENP021189 vhCDR1
GYGVN

SEQ ID NO: 36510 - protein, 16 aa, synthetic construct
  source 1..16: note = Description of Artificial Sequence: Synthetic peptide; note = XENP021189 vhCDR2
MIWGDGSTDYNSALKS

SEQ ID NO: 36511 - protein, 9 aa, synthetic construct
  source 1..9: note = Description of Artificial Sequence: Synthetic peptide; note = XENP021189 vhCDR3
SYYTSDEDY

SEQ ID NO: 36512 - protein, 219 aa, synthetic construct
  source 1..219: note = Description of Artificial Sequence: Synthetic polypeptide; note = XENP021189 3H3_H1_L2.1_IgG1_PVA_/S267K Light Chain
DIVMTQSPDSLAVSLGERATINCKSSQSLLNSRTRKNYLAWYQQKPGQSPKLLIYWASTRESGVPDRFTGSGSGTDFTLTISSLQAEDVAVYYCKQSYSLRTFGGGTKVEIKRTVAAPSVFIFPPSDEQLKSGTASVVCLLNNFYPREAKVQWKVDNALQSGNSQESVTEQDSKDSTYSLSSTLTLSKADYEKHKVYACEVTHQGLSSPVTKSFNRGEC

SEQ ID NO: 36513 - protein, 112 aa, synthetic construct
  source 1..112: note = Description of Artificial Sequence: Synthetic polypeptide; note = VL of XENP021189
DIVMTQSPDSLAVSLGERATINCKSSQSLLNSRTRKNYLAWYQQKPGQSPKLLIYWASTRESGVPDRFTGSGSGTDFTLTISSLQAEDVAVYYCKQSYSLRTFGGGTKVEIK

SEQ ID NO: 36514 - protein, 17 aa, synthetic construct
  source 1..17: note = Description of Artificial Sequence: Synthetic peptide; note = XENP021189 vlCDR1
KSSQSLLNSRTRKNYLA

SEQ ID NO: 36515 - protein, 7 aa, synthetic construct
  source 1..7: note = Description of Artificial Sequence: Synthetic peptide; note = XENP021189 vlCDR2
WASTRES

SEQ ID NO: 36516 - protein, 8 aa, synthetic construct
  source 1..8: note = Description of Artificial Sequence: Synthetic peptide; note = XENP021189 vlCDR3
KQSYSLRT

SEQ ID NO: 36517 - protein, 446 aa, synthetic construct; identical to SEQ ID NO: 36387
  source 1..446: note = Description of Artificial Sequence: Synthetic polypeptide; note = XENP021190 3H3_H2_L1.1_IgG1_PVA_/S267K Heavy Chain

SEQ ID NO: 36518 - protein, 117 aa, synthetic construct; identical to SEQ ID NO: 36388
  source 1..117: note = Description of Artificial Sequence: Synthetic polypeptide; note = VH of XENP021190

SEQ ID NO: 36519 - protein, 5 aa, synthetic construct
  source 1..5: note = Description of Artificial Sequence: Synthetic peptide; note = XENP021190 vhCDR1
GYGVN

SEQ ID NO: 36520 - protein, 16 aa, synthetic construct
  source 1..16: note = Description of Artificial Sequence: Synthetic peptide; note = XENP021190 vhCDR2
MIWGDGSTDYNSALKS

SEQ ID NO: 36521 - protein, 9 aa, synthetic construct
  source 1..9: note = Description of Artificial Sequence: Synthetic peptide; note = XENP021190 vhCDR3
SYYTSDFDY

SEQ ID NO: 36522 - protein, 219 aa, synthetic construct; identical to SEQ ID NO: 36502
  source 1..219: note = Description of Artificial Sequence: Synthetic polypeptide; note = XENP021190 3H3_H2_L1.1_IgG1_PVA_/S267K Light Chain

SEQ ID NO: 36523 - protein, 112 aa, synthetic construct; identical to SEQ ID NO: 36503
  source 1..112: note = Description of Artificial Sequence: Synthetic polypeptide; note = VL of XENP021190

SEQ ID NO: 36524 - protein, 17 aa, synthetic construct
  source 1..17: note = Description of Artificial Sequence: Synthetic peptide; note = XENP021190 vlCDR1
RSSQSLLNSRTRKNYLA

SEQ ID NO: 36525 - protein, 7 aa, synthetic construct
  source 1..7: note = Description of Artificial Sequence: Synthetic peptide; note = XENP021190 vlCDR2
WASTRES

SEQ ID NO: 36526 - protein, 8 aa, synthetic construct
  source 1..8: note = Description of Artificial Sequence: Synthetic peptide; note = XENP021190 vlCDR3
KQSYSLRT

SEQ ID NO: 36527 - protein, 446 aa, synthetic construct; identical to SEQ ID NO: 36387
  source 1..446: note = Description of Artificial Sequence: Synthetic polypeptide; note = XENP021191 3H3_H2_L2.1_IgG1_PVA_/S267K Heavy Chain

SEQ ID NO: 36528 - protein, 117 aa, synthetic construct; identical to SEQ ID NO: 36388
  source 1..117: note = Description of Artificial Sequence: Synthetic polypeptide; note = VH of XENP021191

SEQ ID NO: 36529 - protein, 5 aa, synthetic construct
  source 1..5: note = Description of Artificial Sequence: Synthetic peptide; note = XENP021191 vhCDR1
GYGVN

SEQ ID NO: 36530 - protein, 16 aa, synthetic construct
  source 1..16: note = Description of Artificial Sequence: Synthetic peptide; note = XENP021191 vhCDR2
MIWGDGSTDYNSALKS

SEQ ID NO: 36531 - protein, 9 aa, synthetic construct
  source 1..9: note = Description of Artificial Sequence: Synthetic peptide; note = XENP021191 vhCDR3
SYYTSDFDY

SEQ ID NO: 36532 - protein, 219 aa, synthetic construct; identical to SEQ ID NO: 36512
  source 1..219: note = Description of Artificial Sequence: Synthetic polypeptide; note = XENP021191 3H3_H2_L2.1_IgG1_PVA_/S267K Light Chain

SEQ ID NO: 36533 - protein, 112 aa, synthetic construct; identical to SEQ ID NO: 36513
  source 1..112: note = Description of Artificial Sequence: Synthetic polypeptide; note = VL of XENP021191

SEQ ID NO: 36534 - protein, 17 aa, synthetic construct
  source 1..17: note = Description of Artificial Sequence: Synthetic peptide; note = XENP021191 vlCDR1
KSSQSLLNSRTRKNYLA

SEQ ID NO: 36535 - protein, 7 aa, synthetic construct
  source 1..7: note = Description of Artificial Sequence: Synthetic peptide; note = XENP021191 vlCDR2
WASTRES

SEQ ID NO: 36536 - protein, 8 aa, synthetic construct
  source 1..8: note = Description of Artificial Sequence: Synthetic peptide; note = XENP021191 vlCDR3
KQSYSLRT

SEQ ID NO: 36537 - protein, 446 aa, synthetic construct; identical to SEQ ID NO: 36407
  source 1..446: note = Description of Artificial Sequence: Synthetic polypeptide; note = XENP021192 3H3_H3_L1.1_IgG1_PVA_/S267K Heavy Chain

SEQ ID NO: 36538 - protein, 117 aa, synthetic construct; identical to SEQ ID NO: 36408
  source 1..117: note = Description of Artificial Sequence: Synthetic polypeptide; note = VH of XENP021192

SEQ ID NO: 36539 - protein, 5 aa, synthetic construct
  source 1..5: note = Description of Artificial Sequence: Synthetic peptide; note = XENP021192 vhCDR1
GYGVN

SEQ ID NO: 36540 - protein, 16 aa, synthetic construct
  source 1..16: note = Description of Artificial Sequence: Synthetic peptide; note = XENP021192 vhCDR2
MIWGDGSTDYNSAVKG

SEQ ID NO: 36541 - protein, 9 aa, synthetic construct
  source 1..9: note = Description of Artificial Sequence: Synthetic peptide; note = XENP021192 vhCDR3
SYYTSDEDY

SEQ ID NO: 36542 - protein, 219 aa, synthetic construct; identical to SEQ ID NO: 36502
  source 1..219: note = Description of Artificial Sequence: Synthetic polypeptide; note = XENP021192 3H3_H3_L1.1_IgG1_PVA_/S267K Light Chain

SEQ ID NO: 36543 - protein, 112 aa, synthetic construct; identical to SEQ ID NO: 36503
  source 1..112: note = Description of Artificial Sequence: Synthetic polypeptide; note = VL of XENP021192

SEQ ID NO: 36544 - protein, 17 aa, synthetic construct
  source 1..17: note = Description of Artificial Sequence: Synthetic peptide; note = XENP021192 vlCDR1
RSSQSLLNSRTRKNYLA

SEQ ID NO: 36545 - protein, 7 aa, synthetic construct
  source 1..7: note = Description of Artificial Sequence: Synthetic peptide; note = XENP021192 vlCDR2
WASTRES

SEQ ID NO: 36546 - protein, 8 aa, synthetic construct
  source 1..8: note = Description of Artificial Sequence: Synthetic peptide; note = XENP021192 vlCDR3
KQSYSLRT

SEQ ID NO: 36547 - protein, 446 aa, synthetic construct; identical to SEQ ID NO: 36407
  source 1..446: note = Description of Artificial Sequence: Synthetic polypeptide; note = XENP021193 3H3_H3_L2.1_IgG1_PVA_/S267K Heavy Chain

SEQ ID NO: 36548 - protein, 117 aa, synthetic construct; identical to SEQ ID NO: 36408
  source 1..117: note = Description of Artificial Sequence: Synthetic polypeptide; note = VH of XENP021193

SEQ ID NO: 36549 - protein, 5 aa, synthetic construct
  source 1..5: note = Description of Artificial Sequence: Synthetic peptide; note = XENP021193 vhCDR1
GYGVN

SEQ ID NO: 36550 - protein, 16 aa, synthetic construct
  source 1..16: note = Description of Artificial Sequence: Synthetic peptide; note = XENP021193 vhCDR2
MIWGDGSTDYNSAVKG

SEQ ID NO: 36551 - protein, 9 aa, synthetic construct
  source 1..9: note = Description of Artificial Sequence: Synthetic peptide; note = XENP021193 vhCDR3
SYYTSDEDY

SEQ ID NO: 36552 - protein, 219 aa, synthetic construct; identical to SEQ ID NO: 36512
  source 1..219: note = Description of Artificial Sequence: Synthetic polypeptide; note = XENP021193 3H3_H3_L2.1_IgG1_PVA_/S267K Light Chain

SEQ ID NO: 36553 - protein, 112 aa, synthetic construct; identical to SEQ ID NO: 36513
  source 1..112: note = Description of Artificial Sequence: Synthetic polypeptide; note = VL of XENP021193

SEQ ID NO: 36554 - protein, 17 aa, synthetic construct
  source 1..17: note = Description of Artificial Sequence: Synthetic peptide; note = XENP021193 vlCDR1
KSSQSLLNSRTRKNYLA

SEQ ID NO: 36555 - protein, 7 aa, synthetic construct
  source 1..7: note = Description of Artificial Sequence: Synthetic peptide; note = XENP021193 vlCDR2
WASTRES

SEQ ID NO: 36556 - protein, 8 aa, synthetic construct
  source 1..8: note = Description of Artificial Sequence: Synthetic peptide; note = XENP021193 vlCDR3
KQSYSLRT

SEQ ID NO: 36557 - protein, 446 aa, synthetic construct; identical to SEQ ID NO: 36427
  source 1..446: note = Description of Artificial Sequence: Synthetic polypeptide; note = XENP021194 3H3_H4_L1.1_IgG1_PVA_/S267K Heavy Chain

SEQ ID NO: 36558 - protein, 117 aa, synthetic construct; identical to SEQ ID NO: 36428
  source 1..117: note = Description of Artificial Sequence: Synthetic polypeptide; note = VH of XENP021194

SEQ ID NO: 36559 - protein, 5 aa, synthetic construct
  source 1..5: note = Description of Artificial Sequence: Synthetic peptide; note = XENP021194 vhCDR1
GYGVN

SEQ ID NO: 36560 - protein, 16 aa, synthetic construct
  source 1..16: note = Description of Artificial Sequence: Synthetic peptide; note = XENP021194 vhCDR2
MIWGDGSTDYNPSLKS

SEQ ID NO: 36561 - protein, 9 aa, synthetic construct
  source 1..9: note = Description of Artificial Sequence: Synthetic peptide; note = XENP021194 vhCDR3
SYYTSDEDY

SEQ ID NO: 36562 - protein, 219 aa, synthetic construct; identical to SEQ ID NO: 36502
  source 1..219: note = Description of Artificial Sequence: Synthetic polypeptide; note = XENP021194 3H3_H4_L1.1_IgG1_PVA_/S267K Light Chain

SEQ ID NO: 36563 - protein, 112 aa, synthetic construct; identical to SEQ ID NO: 36503
  source 1..112: note = Description of Artificial Sequence: Synthetic polypeptide; note = VL of XENP021194

SEQ ID NO: 36564 - protein, 17 aa, synthetic construct
  source 1..17: note = Description of Artificial Sequence: Synthetic peptide; note = XENP021194 vlCDR1
RSSQSLLNSRTRKNYLA

SEQ ID NO: 36565 - protein, 7 aa, synthetic construct
  source 1..7: note = Description of Artificial Sequence: Synthetic peptide; note = XENP021194 vlCDR2
WASTRES

SEQ ID NO: 36566 - protein, 8 aa, synthetic construct
  source 1..8: note = Description of Artificial Sequence: Synthetic peptide; note = XENP021194 vlCDR3
KQSYSLRT

SEQ ID NO: 36567 - protein, 446 aa, synthetic construct; identical to SEQ ID NO: 36427
  source 1..446: note = Description of Artificial Sequence: Synthetic polypeptide; note = XENP021195 3H3_H4_L2.1_IgG1_PVA_/S267K Heavy Chain

SEQ ID NO: 36568 - protein, 117 aa, synthetic construct; identical to SEQ ID NO: 36428
  source 1..117: note = Description of Artificial Sequence: Synthetic polypeptide; note = VH of XENP021195

SEQ ID NO: 36569 - protein, 5 aa, synthetic construct
  source 1..5: note = Description of Artificial Sequence: Synthetic peptide; note = XENP021195 vhCDR1
GYGVN

SEQ ID NO: 36570 - protein, 16 aa, synthetic construct
  source 1..16: note = Description of Artificial Sequence: Synthetic peptide; note = XENP021195 vhCDR2
MIWGDGSTDYNPSLKS

SEQ ID NO: 36571 - protein, 9 aa, synthetic construct
  source 1..9: note = Description of Artificial Sequence: Synthetic peptide; note = XENP021195 vhCDR3
SYYTSDEDY

SEQ ID NO: 36572 - protein, 219 aa, synthetic construct; identical to SEQ ID NO: 36512
  source 1..219: note = Description of Artificial Sequence: Synthetic polypeptide; note = XENP021195 3H3_H4_L2.1_IgG1_PVA_/S267K Light Chain

SEQ ID NO: 36573 - protein, 112 aa, synthetic construct; identical to SEQ ID NO: 36513
  source 1..112: note = Description of Artificial Sequence: Synthetic polypeptide; note = VL of XENP021195

SEQ ID NO: 36574 - protein, 17 aa, synthetic construct
  source 1..17: note = Description of Artificial Sequence: Synthetic peptide; note = XENP021195 vlCDR1
KSSQSLLNSRTRKNYLA

SEQ ID NO: 36575 - protein, 7 aa, synthetic construct
  source 1..7: note = Description of Artificial Sequence: Synthetic peptide; note = XENP021195 vlCDR2
WASTRES

SEQ ID NO: 36576 - protein, 8 aa, synthetic construct
  source 1..8: note = Description of Artificial Sequence: Synthetic peptide; note = XENP021195 vlCDR3
KQSYSLRT

SEQ ID NO: 36577 - protein, 447 aa, synthetic construct; identical to SEQ ID NO: 36447
  source 1..447: note = Description of Artificial Sequence: Synthetic polypeptide; note = XENP021196 7B11_H1_L1.1_IgG1_PVA_/S267K Heavy Chain

SEQ ID NO: 36578 - protein, 118 aa, synthetic construct; identical to SEQ ID NO: 36448
  source 1..118: note = Description of Artificial Sequence: Synthetic polypeptide; note = VH of XENP021196

SEQ ID NO: 36579 - protein, 5 aa, synthetic construct
  source 1..5: note = Description of Artificial Sequence: Synthetic peptide; note = XENP021196 vhCDR1
SYAVN

SEQ ID NO: 36580 - protein, 16 aa, synthetic construct
  source 1..16: note = Description of Artificial Sequence: Synthetic peptide; note = XENP021196 vhCDR2
VIWSGGSTDYNAKFQG

SEQ ID NO: 36581 - protein, 10 aa, synthetic construct
  source 1..10: note = Description of Artificial Sequence: Synthetic peptide; note = XENP021196 vhCDR3
LYYRYDGFDY

SEQ ID NO: 36582 - protein, 214 aa, synthetic construct
  source 1..214: note = Description of Artificial Sequence: Synthetic polypeptide; note = XENP021196 7B11_H1_L1.1_IgG1_PVA_/S267K Light Chain
DIVMTQSPSSLSASVGDRVTITCRASQNVGTHVAWYQQKPGKSPKALVYSASYRYSGVPDRFTGSGSGTDFTLTISSLQPEDFATYFCQQYNSYPLTFGGGTKVEIKRTVAAPSVFIFPPSDEQLKSGTASVVCLLNNFYPREAKVQWKVDNALQSGNSQESVTEQDSKDSTYSLSSTLTLSKADYEKHKVYACEVTHQGLSSPVTKSFNRGEC

SEQ ID NO: 36583 - protein, 107 aa, synthetic construct
  source 1..107: note = Description of Artificial Sequence: Synthetic polypeptide; note = VL of XENP021196
DIVMTQSPSSLSASVGDRVTITCRASQNVGTHVAWYQQKPGKSPKALVYSASYRYSGVPDRFTGSGSGTDFTLTISSLQPEDFATYFCQQYNSYPLTFGGGTKVEIK

SEQ ID NO: 36584 - protein, 11 aa, synthetic construct
  source 1..11: note = Description of Artificial Sequence: Synthetic peptide; note = XENP021196 vlCDR1
RASQNVGTHVA

SEQ ID NO: 36585 - protein, 7 aa, synthetic construct
  source 1..7: note = Description of Artificial Sequence: Synthetic peptide; note = XENP021196 vlCDR2
SASYRYS

SEQ ID NO: 36586 - protein, 9 aa, synthetic construct
  source 1..9: note = Description of Artificial Sequence: Synthetic peptide; note = XENP021196 vlCDR3
QQYNSYPLT

SEQ ID NO: 36587 - protein, 447 aa, synthetic construct; identical to SEQ ID NO: 36447
  source 1..447: note = Description of Artificial Sequence: Synthetic polypeptide; note = XENP021201 7B11_H1_L2.1_IgG1_PVA_/S267K Heavy Chain

SEQ ID NO: 36588 - protein, 118 aa, synthetic construct; identical to SEQ ID NO: 36448
  source 1..118: note = Description of Artificial Sequence: Synthetic polypeptide; note = VH of XENP021201

SEQ ID NO: 36589 - protein, 5 aa, synthetic construct
  source 1..5: note = Description of Artificial Sequence: Synthetic peptide; note = XENP021201 vhCDR1
SYAVN

SEQ ID NO: 36590 - protein, 16 aa, synthetic construct
  source 1..16: note = Description of Artificial Sequence: Synthetic peptide; note = XENP021201 vhCDR2
VIWSGGSTDYNAKFQG

SEQ ID NO: 36591 - protein, 10 aa, synthetic construct
  source 1..10: note = Description of Artificial Sequence: Synthetic peptide; note = XENP021201 vhCDR3
LYYRYDGFDY

SEQ ID NO: 36592 - protein, 214 aa, synthetic construct
  source 1..214: note = Description of Artificial Sequence: Synthetic polypeptide; note = XENP021201 7B11_H1_L2.1_IgG1_PVA_/S267K Light Chain
DIVMTQSPDSLAVSLGERATINCKASQNVGTHVAWYQQKPGQSPKALVYSASYRYSGVPDRFTGSGSGTDFTLTISSLQAEDVAVYFCQQYNSYPLTFGGGTKVEIKRTVAAPSVFIFPPSDEQLKSGTASVVCLLNNFYPREAKVQWKVDNALQSGNSQESVTEQDSKDSTYSLSSTLTLSKADYEKHKVYACEVTHQGLSSPVTKSFNRGEC

SEQ ID NO: 36593 - protein, 107 aa, synthetic construct
  source 1..107: note = Description of Artificial Sequence: Synthetic polypeptide; note = VL of XENP021201
DIVMTQSPDSLAVSLGERATINCKASQNVGTHVAWYQQKPGQSPKALVYSASYRYSGVPDRFTGSGSGTDFTLTISSLQAEDVAVYFCQQYNSYPLTFGGGTKVEIK

SEQ ID NO: 36594 - protein, 11 aa, synthetic construct
  source 1..11: note = Description of Artificial Sequence: Synthetic peptide; note = XENP021201 vlCDR1
KASQNVGTHVA

SEQ ID NO: 36595 - protein, 7 aa, synthetic construct
  source 1..7: note = Description of Artificial Sequence: Synthetic peptide; note = XENP021201 vlCDR2
SASYRYS

SEQ ID NO: 36596 - protein, 9 aa, synthetic construct
  source 1..9: note = Description of Artificial Sequence: Synthetic peptide; note = XENP021201 vlCDR3
QQYNSYPLT

SEQ ID NO: 36597 - protein, 447 aa, synthetic construct
  source 1..447: note = Description of Artificial Sequence: Synthetic polypeptide; note = XENP021202 7B11_H2.1_L1.1_IgG1_PVA_/S267K Heavy Chain
EVQLVESGGGLVQPGGSLRLSCAVSGFSLTSYAVNWVRQAPGKGLEWVSVIWSGGSTDYNPSVKGRFTISKDNSKSTVYLQMNSLRAEDTAVYYCVSLYYRYDGFDYWGQGTLVTVSSASTKGPSVFPLAPSSKSTSGGTAALGCLVKDYFPEPVTVSWNSGALTSGVHTFPAVLQSSGLYSLSSVVTVPSSSLGTQTYICNVNHKPSNTKVDKKVEPKSCDKTHTCPPCPAPPVAGPSVFLFPPKPKDTLMISRTPEVTCVVVDVKHEDPEVKFNWYVDGVEVHNAKTKPREEQYNSTYRVVSVLTVLHQDWLNGKEYKCKVSNKALPAPIEKTISKAKGQPREPQVYTLPPSREEMTKNQVSLTCLVKGFYPSDIAVEWESNGQPENNYKTTPPVLDSDGSFFLYSKLTVDKSRWQQGNVFSCSVMHEALHNHYTQKSLSLSPGK

SEQ ID NO: 36598 - protein, 118 aa, synthetic construct
  source 1..118: note = Description of Artificial Sequence: Synthetic polypeptide; note = VH of XENP021202
EVQLVESGGGLVQPGGSLRLSCAVSGFSLTSYAVNWVRQAPGKGLEWVSVIWSGGSTDYNPSVKGRFTISKDNSKSTVYLQMNSLRAEDTAVYYCVSLYYRYDGFDYWGQGTLVTVSS

SEQ ID NO: 36599 - protein, 5 aa, synthetic construct
  source 1..5: note = Description of Artificial Sequence: Synthetic peptide; note = XENP021202 vhCDR1
SYAVN

SEQ ID NO: 36600 - protein, 16 aa, synthetic construct
  source 1..16: note = Description of Artificial Sequence: Synthetic peptide; note = XENP021202 vhCDR2
VIWSGGSTDYNPSVKG

SEQ ID NO: 36601 - protein, 10 aa, synthetic construct
  source 1..10: note = Description of Artificial Sequence: Synthetic peptide; note = XENP021202 vhCDR3
LYYRYDGFDY

SEQ ID NO: 36602 - protein, 214 aa, synthetic construct; identical to SEQ ID NO: 36582
  source 1..214: note = Description of Artificial Sequence: Synthetic polypeptide; note = XENP021202 7B11_H2.1_L1.1_IgG1_PVA_/S267K Light Chain

SEQ ID NO: 36603 - protein, 107 aa, synthetic construct; identical to SEQ ID NO: 36583
  source 1..107: note = Description of Artificial Sequence: Synthetic polypeptide; note = VL of XENP021202

SEQ ID NO: 36604 - protein, 11 aa, synthetic construct
  source 1..11: note = Description of Artificial Sequence: Synthetic peptide; note = XENP021202 vlCDR1
RASQNVGTHVA

SEQ ID NO: 36605 - protein, 7 aa, synthetic construct
  source 1..7: note = Description of Artificial Sequence: Synthetic peptide; note = XENP021202 vlCDR2
SASYRYS

SEQ ID NO: 36606 - protein, 9 aa, synthetic construct
  source 1..9: note = Description of Artificial Sequence: Synthetic peptide; note = XENP021202 vlCDR3
QQYNSYPLT

SEQ ID NO: 36607 - protein, 447 aa, synthetic construct; identical to SEQ ID NO: 36597
  source 1..447: note = Description of Artificial Sequence: Synthetic polypeptide; note = XENP021203 7B11_H2.1_L2.1_IgG1_PVA_/S267K Heavy Chain

SEQ ID NO: 36608 - protein, 118 aa, synthetic construct; identical to SEQ ID NO: 36598
  source 1..118: note = Description of Artificial Sequence: Synthetic polypeptide; note = VH of XENP021203

SEQ ID NO: 36609 - protein, 5 aa, synthetic construct
  source 1..5: note = Description of Artificial Sequence: Synthetic peptide; note = XENP021203 vhCDR1
SYAVN

SEQ ID NO: 36610 - protein, 16 aa, synthetic construct
  source 1..16: note = Description of Artificial Sequence: Synthetic peptide; note = XENP021203 vhCDR2
VIWSGGSTDYNPSVKG

SEQ ID NO: 36611 - protein, 10 aa, synthetic construct
  source 1..10: note = Description of Artificial Sequence: Synthetic peptide; note = XENP021203 vhCDR3
LYYRYDGFDY

SEQ ID NO: 36612 - protein, 214 aa, synthetic construct; identical to SEQ ID NO: 36592
  source 1..214: note = Description of Artificial Sequence: Synthetic polypeptide; note = XENP021203 7B11_H2.1_L2.1_IgG1_PVA_/S267K Light Chain

SEQ ID NO: 36613 - protein, 107 aa, synthetic construct; identical to SEQ ID NO: 36593
  source 1..107: note = Description of Artificial Sequence: Synthetic polypeptide; note = VL of XENP021203

SEQ ID NO: 36614 - protein, 11 aa, synthetic construct
  source 1..11: note = Description of Artificial Sequence: Synthetic peptide; note = XENP021203 vlCDR1
KASQNVGTHVA

SEQ ID NO: 36615 - protein, 7 aa, synthetic construct
  source 1..7: note = Description of Artificial Sequence: Synthetic peptide; note = XENP021203 vlCDR2
SASYRYS

SEQ ID NO: 36616 - protein, 9 aa, synthetic construct
  source 1..9: note = Description of Artificial Sequence: Synthetic peptide; note = XENP021203 vlCDR3
QQYNSYPLT

SEQ ID NO: 36617 - protein, 446 aa, synthetic construct
  source 1..446: note = Description of Artificial Sequence: Synthetic polypeptide; note = XENP021204 7C2_H1.1_L1.1_IgG1_PVA_/S267K Heavy Chain
EVQVLESGGGLVQPGGSLRLSCAASGFTFSRYAMSWVRQAPGKRLEWVSSISSGGSTYYPDSVKGRFTISRDNSKNTLYLQMNSLRAEDTAVYYCARGDYEGYFDYWGQGTLVTVSSASTKGPSVFPLAPSSKSTSGGTAALGCLVKDYFPEPVTVSWNSGALTSGVHTFPAVLQSSGLYSLSSVVTVPSSSLGTQTYICNVNHKPSNTKVDKKVEPKSCDKTHTCPPCPAPPVAGPSVFLFPPKPKDTLMISRTPEVTCVVVDVKHEDPEVKFNWYVDGVEVHNAKTKPREEQYNSTYRVVSVLTVLHQDWLNGKEYKCKVSNKALPAPIEKTISKAKGQPREPQVYTLPPSREEMTKNQVSLTCLVKGFYPSDIAVEWESNGQPENNYKTTPPVLDSDGSFFLYSKLTVDKSRWQQGNVFSCSVMHEALHNHYTQKSLSLSPGK

SEQ ID NO: 36618 - protein, 117 aa, synthetic construct
  source 1..117: note = Description of Artificial Sequence: Synthetic polypeptide; note = VH of XENP021204
EVQVLESGGGLVQPGGSLRLSCAASGFTFSRYAMSWVRQAPGKRLEWVSSISSGGSTYYPDSVKGRFTISRDNSKNTLYLQMNSLRAEDTAVYYCARGDYEGYFDYWGQGTLVTVSS

SEQ ID NO: 36619 - protein, 5 aa, synthetic construct
  source 1..5: note = Description of Artificial Sequence: Synthetic peptide; note = XENP021204 vhCDR1
RYAMS

SEQ ID NO: 36620 - protein, 16 aa, synthetic construct
  source 1..16: note = Description of Artificial Sequence: Synthetic peptide; note = XENP021204 vhCDR2
SISSGGSTYYPDSVKG

SEQ ID NO: 36621 - protein, 9 aa, synthetic construct
  source 1..9: note = Description of Artificial Sequence: Synthetic peptide; note = XENP021204 vhCDR3
GDYEGYFDY

SEQ ID NO: 36622 - protein, 220 aa, synthetic construct
  source 1..220: note = Description of Artificial Sequence: Synthetic polypeptide; note = XENP021204 7C2_H1.1_L1.1_IgG1_PVA_/S267K Light Chain
DIVMTQSPDSLAVSLGERATINCKSSQSLLNSINQKNYLAWYQQKPGQSPKLLVYFASTRESGVPDRFIGSGSGTDFTLTISSLQAEDVAVYFCQQHYSTPLTFGAGTKLEIKRTVAAPSVFIFPPSDEQLKSGTASVVCLLNNFYPREAKVQWKVDNALQSGNSQESVTEQDSKDSTYSLSSTLTLSKADYEKHKVYACEVTHQGLSSPVTKSFNRGEC

SEQ ID NO: 36623 - protein, 113 aa, synthetic construct
  source 1..113: note = Description of Artificial Sequence: Synthetic polypeptide; note = VL of XENP021204
DIVMTQSPDSLAVSLGERATINCKSSQSLLNSINQKNYLAWYQQKPGQSPKLLVYFASTRESGVPDRFIGSGSGTDFTLTISSLQAEDVAVYFCQQHYSTPLTFGAGTKLEIK

SEQ ID NO: 36624 - protein, 17 aa, synthetic construct
  source 1..17: note = Description of Artificial Sequence: Synthetic peptide; note = XENP021204 vlCDR1
KSSQSLLNSINQKNYLA

SEQ ID NO: 36625 - protein, 7 aa, synthetic construct
  source 1..7: note = Description of Artificial Sequence: Synthetic peptide; note = XENP021204 vlCDR2
FASTRES

SEQ ID NO: 36626 - protein, 9 aa, synthetic construct
  source 1..9: note = Description of Artificial Sequence: Synthetic peptide; note = XENP021204 vlCDR3
QQHYSTPLT

SEQ ID NO: 36627 - protein, 442 aa, synthetic construct
  source 1..442: note = Description of Artificial Sequence: Synthetic polypeptide; note = XENP021492 1D12_H0L0_IgG1_PVA_/S267K Heavy Chain
EVQLVESGGGLVKPGGSLKFSCAASGFAFSSFDMSWVRQTPEKRLEWVAYISSDGASTFYPDTMKGRFTISRDNAKNTLYLQMSSLKSEDTAMYYCTRLGAYWGQGTLVTVSAASTKGPSVFPLAPSSKSTSGGTAALGCLVKDYFPEPVTVSWNSGALTSGVHTFPAVLQSSGLYSLSSVVTVPSSSLGTQTYICNVNHKPSNTKVDKKVEPKSCDKTHTCPPCPAPPVAGPSVFLFPPKPKDTLMISRTPEVTCVVVDVKHEDPEVKFNWYVDGVEVHNAKTKPREEQYNSTYRVVSVLTVLHQDWLNGKEYKCKVSNKALPAPIEKTISKAKGQPREPQVYTLPPSREEMTKNQVSLTCLVKGFYPSDIAVEWESNGQPENNYKTTPPVLDSDGSFFLYSKLTVDKSRWQQGNVFSCSVMHEALHNHYTQKSLSLSPGK

SEQ ID NO: 36628 - protein, 113 aa, synthetic construct
  source 1..113: note = Description of Artificial Sequence: Synthetic polypeptide; note = VH of XENP021492
EVQLVESGGGLVKPGGSLKFSCAASGFAFSSFDMSWVRQTPEKRLEWVAYISSDGASTFYPDTMKGRFTISRDNAKNTLYLQMSSLKSEDTAMYYCTRLGAYWGQGTLVTVSA

SEQ ID NO: 36629 - protein, 5 aa, synthetic construct
  source 1..5: note = Description of Artificial Sequence: Synthetic peptide; note = XENP021492 vhCDR1
SFDMS

SEQ ID NO: 36630 - protein, 17 aa, synthetic construct
  source 1..17: note = Description of Artificial Sequence: Synthetic peptide; note = XENP021492 vhCDR2
YISSDGASTFYPDTMKG

SEQ ID NO: 36631 - protein, 4 aa, synthetic construct
  source 1..4: note = Description of Artificial Sequence: Synthetic peptide; note = XENP021492 vhCDR3
LGAY

SEQ ID NO: 36632 - protein, 218 aa, synthetic construct
  source 1..218: note = Description of Artificial Sequence: Synthetic polypeptide; note = XENP021492 1D12_H0L0_IgG1_PVA_/S267K Light Chain
DIVLTQSPASLAVSLGQRATISCRASESVEYYGTSLMQWYQQKPGQPPKLLIYAASNVESGVPARFSGSGSGTDFSLNIHPVEEDDIAMYFCQQSRKVPWTFGGGTKLEIKRTVAAPSVFIFPPSDEQLKSGTASVVCLLNNFYPREAKVQWKVDNALQSGNSQESVTEQDSKDSTYSLSSTLTLSKADYEKHKVYACEVTHQGLSSPVTKSFNRGEC

SEQ ID NO: 36633 - protein, 111 aa, synthetic construct
  source 1..111: note = Description of Artificial Sequence: Synthetic polypeptide; note = VL of XENP021492
DIVLTQSPASLAVSLGQRATISCRASESVEYYGTSLMQWYQQKPGQPPKLLIYAASNVESGVPARFSGSGSGTDFSLNIHPVEEDDIAMYFCQQSRKVPWTFGGGTKLEIK

SEQ ID NO: 36634 - protein, 15 aa, synthetic construct
  source 1..15: note = Description of Artificial Sequence: Synthetic peptide; note = XENP021492 vlCDR1
RASESVEYYGTSLMQ

SEQ ID NO: 36635 - protein, 7 aa, synthetic construct
  source 1..7: note = Description of Artificial Sequence: Synthetic peptide; note = XENP021492 vlCDR2
AASNVES

SEQ ID NO: 36636 - protein, 9 aa, synthetic construct
  source 1..9: note = Description of Artificial Sequence: Synthetic peptide; note = XENP021492 vlCDR3
QQSRKVPWT

SEQ ID NO: 36637 - protein, 446 aa, synthetic construct
  source 1..446: note = Description of Artificial Sequence: Synthetic polypeptide; note = XENP021493 6C8_H0L0_IgG1_PVA_/S267K Heavy Chain
QVQLKESGPGLVAPSQSLSITCTVSGFSLNGYGVNWVRQPPGKGLEWLGMIWGDGSTDYNSALKSRLSISKDNSKSQVFLKMNSLQTDDTARYYCARSYYTSDEDYWGQGTLVTVSAASTKGPSVFPLAPSSKSTSGGTAALGCLVKDYFPEPVTVSWNSGALTSGVHTFPAVLQSSGLYSLSSVVTVPSSSLGTQTYICNVNHKPSNTKVDKKVEPKSCDKTHTCPPCPAPPVAGPSVFLFPPKPKDTLMISRTPEVTCVVVDVKHEDPEVKFNWYVDGVEVHNAKTKPREEQYNSTYRVVSVLTVLHQDWLNGKEYKCKVSNKALPAPIEKTISKAKGQPREPQVYTLPPSREEMTKNQVSLTCLVKGFYPSDIAVEWESNGQPENNYKTTPPVLDSDGSFFLYSKLTVDKSRWQQGNVFSCSVMHEALHNHYTQKSLSLSPGK

SEQ ID NO: 36638 - protein, 117 aa, synthetic construct
  source 1..117: note = Description of Artificial Sequence: Synthetic polypeptide; note = VH of XENP021493
QVQLKESGPGLVAPSQSLSITCTVSGFSLNGYGVNWVRQPPGKGLEWLGMIWGDGSTDYNSALKSRLSISKDNSKSQVFLKMNSLQTDDTARYYCARSYYTSDEDYWGQGTLVTVSA

SEQ ID NO: 36639 - protein, 5 aa, synthetic construct
  source 1..5: note = Description of Artificial Sequence: Synthetic peptide; note = XENP021493 vhCDR1
GYGVN

SEQ ID NO: 36640 - protein, 16 aa, synthetic construct
  source 1..16: note = Description of Artificial Sequence: Synthetic peptide; note = XENP021493 vhCDR2
MIWGDGSTDYNSALKS

SEQ ID NO: 36641 - protein, 9 aa, synthetic construct
  source 1..9: note = Description of Artificial Sequence: Synthetic peptide; note = XENP021493 vhCDR3
SYYTSDEDY

SEQ ID NO: 36642 - protein, 214 aa, synthetic construct
  source 1..214: note = Description of Artificial Sequence: Synthetic polypeptide; note = XENP021493 6C8_H0L0_IgG1_PVA_/S267K Light Chain
DIVMTQSQKFMSTSVGDRVSVTCKASQNVGSNVAWCQQKPGQSPKALIYSASFRYSGVPDRFTGSGSGTDFTLTISNVQSEDLAEYFCQQYNSYPYTFGGGTKLEIKRTVAAPSVFIFPPSDEQLKSGTASVVCLLNNFYPREAKVQWKVDNALQSGNSQESVTEQDSKDSTYSLSSTLTLSKADYEKHKVYACEVTHQGLSSPVTKSFNRGEC

SEQ ID NO: 36643 - protein, 107 aa, synthetic construct
  source 1..107: note = Description of Artificial Sequence: Synthetic polypeptide; note = VL of XENP021493
DIVMTQSQKFMSTSVGDRVSVTCKASQNVGSNVAWCQQKPGQSPKALIYSASFRYSGVPDRFTGSGSGTDFTLTISNVQSEDLAEYFCQQYNSYPYTFGGGTKLEIK

SEQ ID NO: 36644 - protein, 11 aa, synthetic construct
  source 1..11: note = Description of Artificial Sequence: Synthetic peptide; note = XENP021493 vlCDR1
KASQNVGSNVA

SEQ ID NO: 36645 - protein, 7 aa, synthetic construct
  source 1..7: note = Description of Artificial Sequence: Synthetic peptide; note = XENP021493 vlCDR2
SASFRYS

SEQ ID NO: 36646 - protein, 9 aa, synthetic construct
  source 1..9: note = Description of Artificial Sequence: Synthetic peptide; note = XENP021493 vlCDR3
QQYNSYPYT

SEQ ID NO: 36647 - protein, 446 aa, synthetic construct
  source 1..446: note = Description of Artificial Sequence: Synthetic polypeptide; note = XENP021494 6D9_H0_1D12_L0_IgG1_PVA_/S267K Heavy Chain
QVQLKQSGPGLVQPSQSLSITCTVSGFSLTSYGVHWVRQSPGKGLEWLGVIWSGGSTEYNAAFISRLSISKDNSKSQVFFKMNSLQADDTAIYYCARGGLLSPFDYWGQGTTLTVSSASTKGPSVFPLAPSSKSTSGGTAALGCLVKDYFPEPVTVSWNSGALTSGVHTFPAVLQSSGLYSLSSVVTVPSSSLGTQTYICNVNHKPSNTKVDKKVEPKSCDKTHTCPPCPAPPVAGPSVFLFPPKPKDTLMISRTPEVTCVVVDVKHEDPEVKFNWYVDGVEVHNAKTKPREEQYNSTYRVVSVLTVLHQDWLNGKEYKCKVSNKALPAPIEKTISKAKGQPREPQVYTLPPSREEMTKNQVSLTCLVKGFYPSDIAVEWESNGQPENNYKTTPPVLDSDGSFFLYSKLTVDKSRWQQGNVFSCSVMHEALHNHYTQKSLSLSPGK

SEQ ID NO: 36648 - protein, 117 aa, synthetic construct
  source 1..117: note = Description of Artificial Sequence: Synthetic polypeptide; note = VH of XENP021494
QVQLKQSGPGLVQPSQSLSITCTVSGFSLTSYGVHWVRQSPGKGLEWLGVIWSGGSTEYNAAFISRLSISKDNSKSQVFFKMNSLQADDTAIYYCARGGLLSPFDYWGQGTTLTVSS

SEQ ID NO: 36649 - protein, 5 aa, synthetic construct
  source 1..5: note = Description of Artificial Sequence: Synthetic peptide; note = XENP021494 vhCDR1
SYGVH

SEQ ID NO: 36650 - protein, 16 aa, synthetic construct
  source 1..16: note = Description of Artificial Sequence: Synthetic peptide; note = XENP021494 vhCDR2
VIWSGGSTEYNAAFIS

SEQ ID NO: 36651 - protein, 9 aa, synthetic construct
  source 1..9: note = Description of Artificial Sequence: Synthetic peptide; note = XENP021494 vhCDR3
GGLLSPFDY

SEQ ID NO: 36652 - protein, 218 aa, synthetic construct; identical to SEQ ID NO: 36632
  source 1..218: note = Description of Artificial Sequence: Synthetic polypeptide; note = XENP021494 6D9_H0_1D12_L0_IgG1_PVA_/S267K Light Chain

SEQ ID NO: 36653 - protein, 111 aa, synthetic construct; identical to SEQ ID NO: 36633
  source 1..111: note = Description of Artificial Sequence: Synthetic polypeptide; note = VL of XENP021494

SEQ ID NO: 36654 - protein, 15 aa, synthetic construct
  source 1..15: note = Description of Artificial Sequence: Synthetic peptide; note = XENP021494 vlCDR1
RASESVEYYGTSLMQ

SEQ ID NO: 36655 - protein, 7 aa, synthetic construct
  source 1..7: note = Description of Artificial Sequence: Synthetic peptide; note = XENP021494 vlCDR2
AASNVES

SEQ ID NO: 36656 - protein, 9 aa, synthetic construct
  source 1..9: note = Description of Artificial Sequence: Synthetic peptide; note = XENP021494 vlCDR3
QQSRKVPWT

SEQ ID NO: 36657 - protein, 452 aa, synthetic construct
  source 1..452: note = Description of Artificial Sequence: Synthetic polypeptide; note = XENP021495 7A9_H0L0_IgG1_PVA_/S267K Heavy Chain
EVKLLESGGGLVQPGGSLKLSCAASGFDFSRYWMSWVRQAPGKGLEWIGEINPDSSTINYTPSLKDKFLISRDNAKNTLYLQMSKVRSEDTALYYCARPNGYYVGTIFPFAYWGQGTLVTVSAASTKGPSVFPLAPSSKSTSGGTAALGCLVKDYFPEPVTVSWNSGALTSGVHTFPAVLQSSGLYSLSSVVTVPSSSLGTQTYICNVNHKPSNTKVDKKVEPKSCDKTHTCPPCPAPPVAGPSVFLFPPKPKDTLMISRTPEVTCVVVDVKHEDPEVKFNWYVDGVEVHNAKTKPREEQYNSTYRVVSVLTVLHQDWLNGKEYKCKVSNKALPAPIEKTISKAKGQPREPQVYTLPPSREEMTKNQVSLTCLVKGFYPSDIAVEWESNGQPENNYKTTPPVLDSDGSFFLYSKLTVDKSRWQQGNVFSCSVMHEALHNHYTQKSLSLSPGK

SEQ ID NO: 36658 - protein, 123 aa, synthetic construct
  source 1..123: note = Description of Artificial Sequence: Synthetic polypeptide; note = VH of XENP021495
EVKLLESGGGLVQPGGSLKLSCAASGFDFSRYWMSWVRQAPGKGLEWIGEINPDSSTINYTPSLKDKFLISRDNAKNTLYLQMSKVRSEDTALYYCARPNGYYVGTIFPFAYWGQGTLVTVSA

SEQ ID NO: 36659 - protein, 5 aa, synthetic construct
  source 1..5: note = Description of Artificial Sequence: Synthetic peptide; note = XENP021495 vhCDR1
RYWMS

SEQ ID NO: 36660 - protein, 17 aa, synthetic construct
  source 1..17: note = Description of Artificial Sequence: Synthetic peptide; note = XENP021495 vhCDR2
EINPDSSTINYTPSLKD

SEQ ID NO: 36661 - protein, 14 aa, synthetic construct
  source 1..14: note = Description of Artificial Sequence: Synthetic peptide; note = XENP021495 vhCDR3
PNGYYVGTIFPFAY

SEQ ID NO: 36662 - protein, 215 aa, synthetic construct
  source 1..215: note = Description of Artificial Sequence: Synthetic polypeptide; note = XENP021495 7A9_H0L0_IgG1_PVA_/S267K Light Chain
QAVVTQESALTTSPGETVTLTCRSSTGAVTTSNYANWVQEKPDHLFTGLIGGTNNRAPGVPARFSGSLIGDKAALTITGAQTEDEAIYFCALWYSNHWVFGGGTKLTVLGQPKAAPSVTLFPPSSEELQANKATLVCLISDFYPGAVTVAWKADSSPVKAGVETTTPSKQSNNKYAASSYLSLTPEQWKSHRSYSCQVTHEGSTVEKTVAPTECS

SEQ ID NO: 36663 - protein, 215 aa, synthetic construct; identical to SEQ ID NO: 36662
  source 1..215: note = Description of Artificial Sequence: Synthetic polypeptide; note = VL of XENP021495

SEQ ID NO: 36664 - protein, 14 aa, synthetic construct
  source 1..14: note = Description of Artificial Sequence: Synthetic peptide; note = XENP021495 vlCDR1
RSSTGAVTTSNYAN

SEQ ID NO: 36665 - protein, 7 aa, synthetic construct
  source 1..7: note = Description of Artificial Sequence: Synthetic peptide; note = XENP021495 vlCDR2
GTNNRAP

SEQ ID NO: 36666 - protein, 9 aa, synthetic construct
  source 1..9: note = Description of Artificial Sequence: Synthetic peptide; note = XENP021495 vlCDR3
ALWYSNHWV

SEQ ID NO: 36667 - protein, 447 aa, synthetic construct; identical to SEQ ID NO: 20835
  source 1..447: note = Description of Artificial Sequence: Synthetic polypeptide; note = XENP021496 7B11_H0L0_IgG1_PVA_/S267K Heavy Chain

SEQ ID NO: 36668 - protein, 118 aa, synthetic construct; identical to SEQ ID NO: 20836
  source 1..118: note = Description of Artificial Sequence: Synthetic polypeptide; note = VH of XENP021496

SEQ ID NO: 36669 - protein, 5 aa, synthetic construct
  source 1..5: note = Description of Artificial Sequence: Synthetic peptide; note = XENP021496 vhCDR1
SYAVN

SEQ ID NO: 36670 - protein, 16 aa, synthetic construct
  source 1..16: note = Description of Artificial Sequence: Synthetic peptide; note = XENP021496 vhCDR2
VIWSGGSTDYNAAFIS

SEQ ID NO: 36671 - protein, 10 aa, synthetic construct
  source 1..10: note = Description of Artificial Sequence: Synthetic peptide; note = XENP021496 vhCDR3
LYYRYDGFDY

SEQ ID NO: 36672 - protein, 214 aa, synthetic construct
  source 1..214: note = Description of Artificial Sequence: Synthetic polypeptide; note = XENP021496 7B11_H0L0_IgG1_PVA_/S267K Light Chain
DIVMTQSQKFMSTSVGDRVSVTCKASQNVGTHVAWYQQKPGQSPKALVYSASYRYSGVPDRFTGSGSGTDFTLTISNVQSEDLAEYFCQQYNSYPLTFGGGTKLEIKRTVAAPSVFIFPPSDEQLKSGTASVVCLLNNFYPREAKVQWKVDNALQSGNSQESVTEQDSKDSTYSLSSTLTLSKADYEKHKVYACEVTHQGLSSPVTKSFNRGEC

SEQ ID NO: 36673 - protein, 107 aa, synthetic construct
  source 1..107: note = Description of Artificial Sequence: Synthetic polypeptide; note = VL of XENP021496
DIVMTQSQKFMSTSVGDRVSVTCKASQNVGTHVAWYQQKPGQSPKALVYSASYRYSGVPDRFTGSGSGTDFTLTISNVQSEDLAEYFCQQYNSYPLTFGGGTKLEIK

SEQ ID NO: 36674 - protein, 11 aa, synthetic construct
  source 1..11: note = Description of Artificial Sequence: Synthetic peptide; note = XENP021496 vlCDR1
KASQNVGTHVA

SEQ ID NO: 36675 - protein, 7 aa, synthetic construct
  source 1..7: note = Description of Artificial Sequence: Synthetic peptide; note = XENP021496 vlCDR2
SASYRYS

SEQ ID NO: 36676 - protein, 9 aa, synthetic construct
  source 1..9: note = Description of Artificial Sequence: Synthetic peptide; note = XENP021496 vlCDR3
QQYNSYPLT

SEQ ID NO: 36677 - protein, 447 aa, synthetic construct; identical to SEQ ID NO: 20845
  source 1..447: note = Description of Artificial Sequence: Synthetic polypeptide; note = XENP021501 7B11var_H0L0_IgG1_PVA_/S267K Heavy Chain

SEQ ID NO: 36678 - protein, 118 aa, synthetic construct; identical to SEQ ID NO: 20846
  source 1..118: note = Description of Artificial Sequence: Synthetic polypeptide; note = VH of XENP021501

SEQ ID NO: 36679 - protein, 5 aa, synthetic construct
  source 1..5: note = Description of Artificial Sequence: Synthetic peptide; note = XENP021501 vhCDR1
SYAVN

SEQ ID NO: 36680 - protein, 16 aa, synthetic construct
  source 1..16: note = Description of Artificial Sequence: Synthetic peptide; note = XENP021501 vhCDR2
VIWSGGSTDYNAAFIS

SEQ ID NO: 36681 - protein, 10 aa, synthetic construct
  source 1..10: note = Description of Artificial Sequence: Synthetic peptide; note = XENP021501 vhCDR3
LYYRYDGFDY

SEQ ID NO: 36682 - protein, 214 aa, synthetic construct; identical to SEQ ID NO: 36672
  source 1..214: note = Description of Artificial Sequence: Synthetic polypeptide; note = XENP021501 7B11var_H0L0_IgG1_PVA_/S267K Light Chain

SEQ ID NO: 36683 - protein, 107 aa, synthetic construct; identical to SEQ ID NO: 36673
  source 1..107: note = Description of Artificial Sequence: Synthetic polypeptide; note = VL of XENP021501

SEQ ID NO: 36684 - protein, 11 aa, synthetic construct
  source 1..11: note = Description of Artificial Sequence: Synthetic peptide; note = XENP021501 vlCDR1
KASQNVGTHVA

SEQ ID NO: 36685 - protein, 7 aa, synthetic construct
  source 1..7: note = Description of Artificial Sequence: Synthetic peptide; note = XENP021501 vlCDR2
SASYRYS

SEQ ID NO: 36686 - protein, 9 aa, synthetic construct
  source 1..9: note = Description of Artificial Sequence: Synthetic peptide; note = XENP021501 vlCDR3
QQYNSYPLT

SEQ ID NO: 36687 - protein, 446 aa, synthetic construct
  source 1..446: note = Description of Artificial Sequence: Synthetic polypeptide; note = XENP021502 7C2_H0L0_IgG1_PVA_/S267K Heavy Chain
EVKVVESGGGLVKPGGSLKLSCAASGFTFSRYAMSWVRQTPEKRLEWVASISSGGSTYYPDSVQGRFTISRDNARNILYLQMSSLRSEDTAMYYCARGDYEGYFDYWGQGTSLTVSSASTKGPSVFPLAPSSKSTSGGTAALGCLVKDYFPEPVTVSWNSGALTSGVHTFPAVLQSSGLYSLSSVVTVPSSSLGTQTYICNVNHKPSNTKVDKKVEPKSCDKTHTCPPCPAPPVAGPSVFLFPPKPKDTLMISRTPEVTCVVVDVKHEDPEVKFNWYVDGVEVHNAKTKPREEQYNSTYRVVSVLTVLHQDWLNGKEYKCKVSNKALPAPIEKTISKAKGQPREPQVYTLPPSREEMTKNQVSLTCLVKGFYPSDIAVEWESNGQPENNYKTTPPVLDSDGSFFLYSKLTVDKSRWQQGNVFSCSVMHEALHNHYTQKSLSLSPGK

SEQ ID NO: 36688 - protein, 117 aa, synthetic construct
  source 1..117: note = Description of Artificial Sequence: Synthetic polypeptide; note = VH of XENP021502
EVKVVESGGGLVKPGGSLKLSCAASGFTFSRYAMSWVRQTPEKRLEWVASISSGGSTYYPDSVQGRFTISRDNARNILYLQMSSLRSEDTAMYYCARGDYEGYFDYWGQGTSLTVSS

SEQ ID NO: 36689 - protein, 5 aa, synthetic construct
  source 1..5: note = Description of Artificial Sequence: Synthetic peptide; note = XENP021502 vhCDR1
RYAMS

SEQ ID NO: 36690 - protein, 16 aa, synthetic construct
  source 1..16: note = Description of Artificial Sequence: Synthetic peptide; note = XENP021502 vhCDR2
SISSGGSTYYPDSVQG

SEQ ID NO: 36691 - protein, 9 aa, synthetic construct
  source 1..9: note = Description of Artificial Sequence: Synthetic peptide; note = XENP021502 vhCDR3
GDYEGYFDY

SEQ ID NO: 36692 - protein, 220 aa, synthetic construct
  source 1..220: note = Description of Artificial Sequence: Synthetic polypeptide; note = XENP021502 7C2_H0L0_IgG1_PVA_/S267K Light Chain
DIVMTQSPSSLAMSVGQKVTMSCKSSQSLLNSINQKNYLAWYQQKPGQSPKLLVYFASTRESGVPDRFIGSGSGTDFTLTISSVQAEDLADYFCQQHYSTPLTFGAGTKLELKRTVAAPSVFIFPPSDEQLKSGTASVVCLLNNFYPREAKVQWKVDNALQSGNSQESVTEQDSKDSTYSLSSTLTLSKADYEKHKVYACEVTHQGLSSPVTKSFNRGEC

SEQ ID NO: 36693 - protein, 113 aa, synthetic construct
  source 1..113: note = Description of Artificial Sequence: Synthetic polypeptide; note = VL of XENP021502
DIVMTQSPSSLAMSVGQKVTMSCKSSQSLLNSINQKNYLAWYQQKPGQSPKLLVYFASTRESGVPDRFIGSGSGTDFTLTISSVQAEDLADYFCQQHYSTPLTFGAGTKLELK

SEQ ID NO: 36694 - protein, 17 aa, synthetic construct
  source 1..17: note = Description of Artificial Sequence: Synthetic peptide; note = XENP021502 vlCDR1
KSSQSLLNSINQKNYLA

SEQ ID NO: 36695 - protein, 7 aa, synthetic construct
  source 1..7: note = Description of Artificial Sequence: Synthetic peptide; note = XENP021502 vlCDR2
FASTRES

SEQ ID NO: 36696 - protein, 9 aa, synthetic construct
  source 1..9: note = Description of Artificial Sequence: Synthetic peptide; note = XENP021502 vlCDR3
QQHYSTPLT

SEQ ID NO: 36697 - protein, 442 aa, synthetic construct; identical to SEQ ID NO: 36627
  source 1..442: note = Description of Artificial Sequence: Synthetic polypeptide; note = XENP021503 1D10_H0L0_IgG1_PVA_/S267K Heavy Chain

SEQ ID NO: 36698 - protein, 113 aa, synthetic construct; identical to SEQ ID NO: 36628
  source 1..113: note = Description of Artificial Sequence: Synthetic polypeptide; note = VH of XENP021503

SEQ ID NO: 36699 - protein, 5 aa, synthetic construct
  source 1..5: note = Description of Artificial Sequence: Synthetic peptide; note = XENP021503 vhCDR1
SFDMS

SEQ ID NO: 36700 - protein, 17 aa, synthetic construct
  source 1..17: note = Description of Artificial Sequence: Synthetic peptide; note = XENP021503 vhCDR2
YISSDGASTFYPDTMKG

SEQ ID NO: 36701 - protein, 4 aa, synthetic construct
  source 1..4: note = Description of Artificial Sequence: Synthetic peptide; note = XENP021503 vhCDR3
LGAY

SEQ ID NO: 36702 - protein, 219 aa, synthetic construct
  source 1..219: note = Description of Artificial Sequence: Synthetic polypeptide; note = XENP021503 1D10_H0L0_IgG1_PVA_/S267K Light Chain
DVVMTQTPLTLSVTIGQPASISCKSSQSLLDSDGKTYLNWLLQRPGQSPKRLIYLVSKLDSGVPDRFTGSGSGTDFTLKISRVEAEDLGVYYCWQGTHFPYTFGGGTKLEIKRTVAAPSVFIFPPSDEQLKSGTASVVCLLNNFYPREAKVQWKVDNALQSGNSQESVTEQDSKDSTYSLSSTLTLSKADYEKHKVYACEVTHQGLSSPVTKSFNRGEC

SEQ ID NO: 36703 - protein, 112 aa, synthetic construct
  source 1..112: note = Description of Artificial Sequence: Synthetic polypeptide; note = VL of XENP021503
DVVMTQTPLTLSVTIGQPASISCKSSQSLLDSDGKTYLNWLLQRPGQSPKRLIYLVSKLDSGVPDRFTGSGSGTDFTLKISRVEAEDLGVYYCWQGTHFPYTFGGGTKLEIK

SEQ ID NO: 36704 - protein, 16 aa, synthetic construct
  source 1..16: note = Description of Artificial Sequence: Synthetic peptide; note = XENP021503 vlCDR1
KSSQSLLDSDGKTYLN

SEQ ID NO: 36705 - protein, 7 aa, synthetic construct
  source 1..7: note = Description of Artificial Sequence: Synthetic peptide; note = XENP021503 vlCDR2
LVSKLDS

SEQ ID NO: 36706 - protein, 9 aa, synthetic construct
  source 1..9: note = Description of Artificial Sequence: Synthetic peptide; note = XENP021503 vlCDR3
WQGTHFPYT

SEQ ID NO: 36707 - protein, 120 aa, synthetic construct
  source 1..120: note = Description of Artificial Sequence: Synthetic polypeptide; note = 3C2[BTLA] variable heavy Chain
QVQLQESGPGLVKPSETLSLTCTISGGSISNYYWNWIRQPPGKGLEWIGYIYYSTSTKYNPSLKSRVTMSVETSKNQFSLKLSSVTAADTAVYYCARVKVYSTGWFFDYWGQGTLVTVSS

SEQ ID NO: 36708 - protein, 5 aa, synthetic construct
  source 1..5: note = Description of Artificial Sequence: Synthetic peptide; note = 3C2[BTLA] vhCDR1
NYYWN

SEQ ID NO: 36709 - protein, 16 aa, synthetic construct
  source 1..16: note = Description of Artificial Sequence: Synthetic peptide; note = 3C2[BTLA] vhCDR2
YIYYSTSTKYNPSLKS

SEQ ID NO: 36710 - protein, 12 aa, synthetic construct
  source 1..12: note = Description of Artificial Sequence: Synthetic peptide; note = 3C2[BTLA] vhCDR3
VKVYSTGWFFDY

SEQ ID NO: 36711 - protein, 107 aa, synthetic construct [sequence omitted]

SEQ ID NO: 36712 - protein, 11 aa, synthetic construct
  source 1..11: note = Description of Artificial Sequence: Synthetic peptide; note = 3C2[BTLA] vlCDR1
RASQGISSALA

SEQ ID NO: 36713 - protein, 7 aa, synthetic construct
  source 1..7: note = Description of Artificial Sequence: Synthetic peptide; note = 3C2[BTLA] vlCDR2
DASSLES

SEQ ID NO: 36714 - protein, 9 aa, synthetic construct
  source 1..9: note = Description of Artificial Sequence: Synthetic peptide; note = 3C2[BTLA] vlCDR3
QQFNSYPLT

SEQ ID NO: 36715 - protein, 127 aa, synthetic construct
  source 1..127: note = Description of Artificial Sequence: Synthetic polypeptide; note = 11E2[BTLA] variable heavy Chain
EVQLVESGGGVIRPGGSLRLSCAASGFTFDDYGMSWVRQAPGKGLEWVSGINWNGGSTGYAASVKGRFTISRDNAKNSLYLQMNSLRAEDSALYYCARDYYYGPGSPNYFYYAMDVWGQGTTVTVSS

SEQ ID NO: 36716 - protein, 5 aa, synthetic construct
  source 1..5: note = Description of Artificial Sequence: Synthetic peptide; note = 11E2[BTLA] vhCDR1
DYGMS

SEQ ID NO: 36717 - protein, 17 aa, synthetic construct
  source 1..17: note = Description of Artificial Sequence: Synthetic peptide; note = 11E2[BTLA] vhCDR2
GINWNGGSTGYAASVKG

SEQ ID NO: 36718 - protein, 18 aa, synthetic construct
  source 1..18: note = Description of Artificial Sequence: Synthetic peptide; note = 11E2[BTLA] vhCDR3
DYYYGPGSPNYFYYAMDV

SEQ ID NO: 36719 - protein, 107 aa, synthetic construct
  source 1..107: note = Description of Artificial Sequence: Synthetic polypeptide; note = 11E2[BTLA] variable light Chain
DIQMTQSPSSLSASVGDRVTITCRASQGISSWLAWYQQKPEKAPKSLIYAASSLQSGVPSRFSGSGSGTDFTLTISSLQPEDFATYYCQQYNSYPRTFGQGTKVEIK

SEQ ID NO: 36720 - protein, 11 aa, synthetic construct
  source 1..11: note = Description of Artificial Sequence: Synthetic peptide; note = 11E2[BTLA] vlCDR1
RASQGISSWLA

SEQ ID NO: 36721 - protein, 7 aa, synthetic construct
  source 1..7: note = Description of Artificial Sequence: Synthetic peptide; note = 11E2[BTLA] vlCDR2
AASSLQS

SEQ ID NO: 36722 - protein, 9 aa, synthetic construct
  source 1..9: note = Description of Artificial Sequence: Synthetic peptide; note = 11E2[BTLA] vlCDR3
QQYNSYPRT

SEQ ID NO: 36723 - protein, 119 aa, synthetic construct; identical to SEQ ID NO: 20886
  source 1..119: note = Description of Artificial Sequence: Synthetic polypeptide; note = 4C7[BTLA] variable heavy Chain

SEQ ID NO: 36724 - protein, 5 aa, synthetic construct
  source 1..5: note = Description of Artificial Sequence: Synthetic peptide; note = 4C7[BTLA] vhCDR1
HYYWS

SEQ ID NO: 36725 - protein, 16 aa, synthetic construct
  source 1..16: note = Description of Artificial Sequence: Synthetic peptide; note = 4C7[BTLA] vhCDR2
YIYYSGSTKYNPSLKS

SEQ ID NO: 36726 - protein, 11 aa, synthetic construct
  source 1..11: note = Description of Artificial Sequence: Synthetic peptide; note = 4C7[BTLA] vhCDR3
EWPYYYYEMDV

SEQ ID NO: 36727 - protein, 108 aa, synthetic construct; identical to SEQ ID NO: 20891
  source 1..108: note = Description of Artificial Sequence: Synthetic polypeptide; note = 4C7[BTLA] variable light Chain

SEQ ID NO: 36728 - protein, 12 aa, synthetic construct
  source 1..12: note = Description of Artificial Sequence: Synthetic peptide; note = 4C7[BTLA] vlCDR1
RASQSVSSSYLA

SEQ ID NO: 36729 - protein, 7 aa, synthetic construct
  source 1..7: note = Description of Artificial Sequence: Synthetic peptide; note = 4C7[BTLA] vlCDR2
GASSRAT

SEQ ID NO: 36730 - protein, 9 aa, synthetic construct
  source 1..9: note = Description of Artificial Sequence: Synthetic peptide; note = 4C7[BTLA] vlCDR3
QQYGSSFRT

SEQ ID NO: 36731 - protein, 121 aa, synthetic construct; identical to SEQ ID NO: 20896
  source 1..121: note = Description of Artificial Sequence: Synthetic polypeptide; note = 8D5[BTLA] variable heavy Chain

SEQ ID NO: 36732 - protein, 5 aa, synthetic construct
  source 1..5: note = Description of Artificial Sequence: Synthetic peptide; note = 8D5[BTLA] vhCDR1
SYDMH

SEQ ID NO: 36733 - protein, 16 aa, synthetic construct
  source 1..16: note = Description of Artificial Sequence: Synthetic peptide; note = 8D5[BTLA] vhCDR2
VIGPAGDTYYPGSVKG

SEQ ID NO: 36734 - protein, 13 aa, synthetic construct
  source 1..13: note = Description of Artificial Sequence: Synthetic peptide; note = 8D5[BTLA] vhCDR3
EGMAAHNYYGMDV

SEQ ID NO: 36735 - protein, 108 aa, synthetic construct; identical to SEQ ID NO: 20901
  source 1..108: note = Description of Artificial Sequence: Synthetic polypeptide; note = 8D5[BTLA] variable light Chain

SEQ ID NO: 36736 - protein, 11 aa, synthetic construct
  source 1..11: note = Description of Artificial Sequence: Synthetic peptide; note = 8D5[BTLA] vlCDR1
RASQSVSSYLA

SEQ ID NO: 36737 - protein, 7 aa, synthetic construct
  source 1..7: note = Description of Artificial Sequence: Synthetic peptide; note = 8D5[BTLA] vlCDR2
DASNRAT

SEQ ID NO: 36738 - protein, 10 aa, synthetic construct
  source 1..10: note = Description of Artificial Sequence: Synthetic peptide; note = 8D5[BTLA] vlCDR3
QQRSNWPPIT

SEQ ID NO: 36739 - protein, 118 aa, synthetic construct; identical to SEQ ID NO: 22
  source 1..118: note = Description of Artificial Sequence: Synthetic polypeptide; note = ipilimumab[CTLA-4] variable heavy Chain

SEQ ID NO: 36740 - protein, 5 aa, synthetic construct
  source 1..5: note = Description of Artificial Sequence: Synthetic peptide; note = ipilimumab[CTLA-4] vhCDR1
SYTMH

SEQ ID NO: 36741 - protein, 17 aa, synthetic construct
  source 1..17: note = Description of Artificial Sequence: Synthetic peptide; note = ipilimumab[CTLA-4] vhCDR2
FISYDGNNKYYADSVKG

SEQ ID NO: 36742 - protein, 9 aa, synthetic construct
  source 1..9: note = Description of Artificial Sequence: Synthetic peptide; note = ipilimumab[CTLA-4] vhCDR3
TGWLGPFDY

SEQ ID NO: 36743 - protein, 108 aa, synthetic construct; identical to SEQ ID NO: 23
  source 1..108: note = Description of Artificial Sequence: Synthetic polypeptide; note = ipilimumab[CTLA-4] variable light Chain

SEQ ID NO: 36744 - protein, 12 aa, synthetic construct
  source 1..12: note = Description of Artificial Sequence: Synthetic peptide; note = ipilimumab[CTLA-4] vlCDR1
RASQSVGSSYLA

SEQ ID NO: 36745 - protein, 7 aa, synthetic construct
  source 1..7: note = Description of Artificial Sequence: Synthetic peptide; note = ipilimumab[CTLA-4] vlCDR2
GAFSRAT

SEQ ID NO: 36746 - protein, 9 aa, synthetic construct
  source 1..9: note = Description of Artificial Sequence: Synthetic peptide; note = ipilimumab[CTLA-4] vlCDR3
QQYGSSPWT

SEQ ID NO: 36747 - protein, 125 aa, synthetic construct; identical to SEQ ID NO: 22690
  source 1..125: note = Description of Artificial Sequence: Synthetic polypeptide; note = tremelimumab[CTLA-4] variable heavy Chain

SEQ ID NO: 36748 - protein, 5 aa, synthetic construct
  source 1..5: note = Description of Artificial Sequence: Synthetic peptide; note = tremelimumab[CTLA-4] vhCDR1
SYGMH

SEQ ID NO: 36749 - protein, 17 aa, synthetic construct
  source 1..17: note = Description of Artificial Sequence: Synthetic peptide; note = tremelimumab[CTLA-4] vhCDR2
VIWYDGSNKYYADSVKG

SEQ ID NO: 36750 - protein, 16 aa, synthetic construct
  source 1..16: note = Description of Artificial Sequence: Synthetic peptide; note = tremelimumab[CTLA-4] vhCDR3
DPRGATLYYYYYGMDV

SEQ ID NO: 36751 - protein, 107 aa, synthetic construct; identical to SEQ ID NO: 22691
  source 1..107: note = Description of Artificial Sequence: Synthetic polypeptide; note = tremelimumab[CTLA-4] variable light Chain

SEQ ID NO: 36752 - protein, 11 aa, synthetic construct
  source 1..11: note = Description of Artificial Sequence: Synthetic peptide; note = tremelimumab[CTLA-4] vlCDR1
RASQSINSYLD

SEQ ID NO: 36753 - protein, 7 aa, synthetic construct
  source 1..7: note = Description of Artificial Sequence: Synthetic peptide; note = tremelimumab[CTLA-4] vlCDR2
AASSLQS

SEQ ID NO: 36754 - protein, 9 aa, synthetic construct
  source 1..9: note = Description of Artificial Sequence: Synthetic peptide; note = tremelimumab[CTLA-4] vlCDR3
QQYYSTPFT

SEQ ID NO: 36755 - protein, 118 aa, synthetic construct
  source 1..118: note = Description of Artificial Sequence: Synthetic polypeptide; note = AGEN1884[CTLA-4] variable heavy Chain
EVQLVESGGGLVKPGGSLRLSCAASGFTFSSYSMNWVRQAPGKGLEWVSSISSSSSYIYYADSVKGRFTISRDNAKNSLYLQMNSLRAEDTAVYYCARVGLMGPFDIWGQGTMVTVSS

SEQ ID NO: 36756 - protein, 5 aa, synthetic construct
  source 1..5: note = Description of Artificial Sequence: Synthetic peptide; note = AGEN1884[CTLA-4] vhCDR1
SYSMN

SEQ ID NO: 36757 - protein, 17 aa, synthetic construct
  source 1..17: note = Description of Artificial Sequence: Synthetic peptide; note = AGEN1884[CTLA-4] vhCDR2
SISSSSSYIYYADSVKG

SEQ ID NO: 36758 - protein, 9 aa, synthetic construct
  source 1..9: note = Description of Artificial Sequence: Synthetic peptide; note = AGEN1884[CTLA-4] vhCDR3
VGLMGPFDI

SEQ ID NO: 36759 - protein, 107 aa, synthetic construct
  source 1..107: note = Description of Artificial Sequence: Synthetic polypeptide; note = AGEN1884[CTLA-4] variable light Chain
EIVLTQSPGTLSLSPGERATLSCRASQSVSRYLGWYQQKPGQAPRLLIYGASTRATGIPDRFSGSGSGTDFTLTITRLEPEDFAVYYCQQYGSSPWTFGQGTKVEIK

SEQ ID NO: 36760 - protein, 11 aa, synthetic construct
  source 1..11: note = Description of Artificial Sequence: Synthetic peptide; note = AGEN1884[CTLA-4] vlCDR1
RASQSVSRYLG

SEQ ID NO: 36761 - protein, 7 aa, synthetic construct
  source 1..7: note = Description of Artificial Sequence: Synthetic peptide; note = AGEN1884[CTLA-4] vlCDR2
GASTRAT

SEQ ID NO: 36762 - protein, 9 aa, synthetic construct
  source 1..9: note = Description of Artificial Sequence: Synthetic peptide; note = AGEN1884[CTLA-4] vlCDR3
QQYGSSPWT

SEQ ID NO: 36763 - protein, 116 aa, synthetic construct
  source 1..116: note = Description of Artificial Sequence: Synthetic polypeptide; note = 4.3F6B5[CTLA-4] variable heavy Chain
EVQLQPSGPVLVKPGASVKISCKASGYTFTDYKIHWVKQSHGKSLEWIGYIYPYSGSSDYNQKFKSKATLTVDNSSTTAYMELRSLTSEDSAVYYCARGGDAMDYWGQGTAVTVSS

SEQ ID NO: 36764 - protein, 5 aa, synthetic construct
  source 1..5: note = Description of Artificial Sequence: Synthetic peptide; note = 4.3F6B5[CTLA-4] vhCDR1
DYKIH

SEQ ID NO: 36765 - protein, 17 aa, synthetic construct
  source 1..17: note = Description of Artificial Sequence: Synthetic peptide; note = 4.3F6B5[CTLA-4] vhCDR2
YIYPYSGSSDYNQKFKS

SEQ ID NO: 36766 - protein, 7 aa, synthetic construct
  source 1..7: note = Description of Artificial Sequence: Synthetic peptide; note = 4.3F6B5[CTLA-4] vhCDR3
GGDAMDY

SEQ ID NO: 36767 - protein, 106 aa, synthetic construct
  source 1..106: note = Description of Artificial Sequence: Synthetic polypeptide; note = 4.3F6B5[CTLA-4] variable light Chain
DILMTQSPASLSASVGETVTITCGASENIYGALNWYQRKQGKSPQLLIYGATNLADGMSSRFSGSGLGRQYYLKISSLHPDDVATYFCQNILGTWTFGGGTKLEIK

SEQ ID NO: 36768 - protein, 11 aa, synthetic construct
  source 1..11: note = Description of Artificial Sequence: Synthetic peptide; note = 4.3F6B5[CTLA-4] vlCDR1
GASENIYGALN

SEQ ID NO: 36769 - protein, 7 aa, synthetic construct
  source 1..7: note = Description of Artificial Sequence: Synthetic peptide; note = 4.3F6B5[CTLA-4] vlCDR2
GATNLAD

SEQ ID NO: 36770 - protein, 8 aa, synthetic construct
  source 1..8: note = Description of Artificial Sequence: Synthetic peptide; note = 4.3F6B5[CTLA-4] vlCDR3
QNILGTWT

SEQ ID NO: 36771 - protein, 117 aa, synthetic construct
  source 1..117: note = Description of Artificial Sequence: Synthetic polypeptide; note = 4.8H10H5[CTLA-4] variable heavy Chain
DVKLVESGGGLVKLGGSLKLSCAASGFTFNIYYMSWVRQTPEKRLELVAAINPDGGNTYYPDTVKGRFTISRDNAKNTLYLQMSSLKSEDSALYYCARYGGPGFDSWGQGTTLTVSS

SEQ ID NO: 36772 - protein, 5 aa, synthetic construct
  source 1..5: note = Description of Artificial Sequence: Synthetic peptide; note = 4.8H10H5[CTLA-4] vhCDR1
IYYMS

SEQ ID NO: 36773 - protein, 17 aa, synthetic construct
  source 1..17: note = Description of Artificial Sequence: Synthetic peptide; note = 4.8H10H5[CTLA-4] vhCDR2
AINPDGGNTYYPDTVKG

SEQ ID NO: 36774 - protein, 8 aa, synthetic construct
  source 1..8: note = Description of Artificial Sequence: Synthetic peptide; note = 4.8H10H5[CTLA-4] vhCDR3
YGGPGFDS

SEQ ID NO: 36775 - protein, 108 aa, synthetic construct
  source 1..108: note = Description of Artificial Sequence: Synthetic polypeptide; note = 4.8H10H5[CTLA-4] variable light Chain
ENVLTQSPAIMSASPGERVTMTCSASSSVSYMHWYQQKSNTSPKLWIYDTSKLASGVPGRFSGSGSRNSYSLTISSMEAEDVATYYCFPGSGFPFMYTFGGGTKLEIK

SEQ ID NO: 36776 - protein, 10 aa, synthetic construct
  source 1..10: note = Description of Artificial Sequence: Synthetic peptide; note = 4.8H10H5[CTLA-4] vlCDR1
SASSSVSYMH

SEQ ID NO: 36777 - protein, 7 aa, synthetic construct
  source 1..7: note = Description of Artificial Sequence: Synthetic peptide; note = 4.8H10H5[CTLA-4] vlCDR2
DTSKLAS

SEQ ID NO: 36778 - protein, 11 aa, synthetic construct
  source 1..11: note = Description of Artificial Sequence: Synthetic peptide; note = 4.8H10H5[CTLA-4] vlCDR3
FPGSGFPFMYT

SEQ ID NO: 36779 - protein, 116 aa, synthetic construct
  source 1..116: note = Description of Artificial Sequence: Synthetic polypeptide; note = TGN2122.C[CTLA-4] variable heavy Chain
QVQLVQSGAEVKKPGASVKVSCKASGYTFTDYKIHWVRQAPGQGLEWIGYIYPYSGSSDYNQKFKSRATLTVDNSISTAYMELSRLRSDDTAVYYCARGGDAMDYWGQGTLVTVSS

SEQ ID NO: 36780 - protein, 5 aa, synthetic construct
  source 1..5: note = Description of Artificial Sequence: Synthetic peptide; note = TGN2122.C[CTLA-4] vhCDR1
DYKIH

SEQ ID NO: 36781 - protein, 17 aa, synthetic construct
  source 1..17: note = Description of Artificial Sequence: Synthetic peptide; note = TGN2122.C[CTLA-4] vhCDR2
YIYPYSGSSDYNQKFKS

SEQ ID NO: 36782 - protein, 7 aa, synthetic construct
  source 1..7: note = Description of Artificial Sequence: Synthetic peptide; note = TGN2122.C[CTLA-4] vhCDR3
GGDAMDY

SEQ ID NO: 36783 - protein, 106 aa, synthetic construct
  source 1..106: note = Description of Artificial Sequence: Synthetic polypeptide; note = TGN2122.C[CTLA-4] variable light Chain
DIQMTQSPSSLSASVGDRVTITCGASENIYGALNWYQRKPGKAPKLLIYGATNLADGVPSRFSGSGSGRDYTLTISSLQPEDFATYFCQNILGTWTFGGGTKVEIK

SEQ ID NO: 36784 - protein, 11 aa, synthetic construct
  source 1..11: note = Description of Artificial Sequence: Synthetic peptide; note = TGN2122.C[CTLA-4] vlCDR1
GASENIYGALN

SEQ ID NO: 36785 - protein, 7 aa, synthetic construct
  source 1..7: note = Description of Artificial Sequence: Synthetic peptide; note = TGN2122.C[CTLA-4] vlCDR2
GATNLAD

SEQ ID NO: 36786 - protein, 8 aa, synthetic construct
  source 1..8: note = Description of Artificial Sequence: Synthetic peptide; note = TGN2122.C[CTLA-4] vlCDR3
QNILGTWT

SEQ ID NO: 36787 - protein, 117 aa, synthetic construct
  source 1..117: note = Description of Artificial Sequence: Synthetic polypeptide; note = TGN2122.H[CTLA-4] variable heavy Chain
EVQLVESGGGLVQPGGSLRLSCAASGFTFNIYYMSWVRQAPGKGLELVAAINPDGGNTYYPDTVKGRFTISRDNAKNSLYLQMNSLRAEDTAVYYCARYGGPGFDSWGQGTLVTVSS

SEQ ID NO: 36788 - protein, 5 aa, synthetic construct
  source 1..5: note = Description of Artificial Sequence: Synthetic peptide; note = TGN2122.H[CTLA-4] vhCDR1
IYYMS

SEQ ID NO: 36789 - protein, 17 aa, synthetic construct
  source 1..17: note = Description of Artificial Sequence: Synthetic peptide; note = TGN2122.H[CTLA-4] vhCDR2
AINPDGGNTYYPDTVKG

SEQ ID NO: 36790 - protein, 8 aa, synthetic construct
  source 1..8: note = Description of Artificial Sequence: Synthetic peptide; note = TGN2122.H[CTLA-4] vhCDR3
YGGPGFDS

SEQ ID NO: 36791 - protein, 108 aa, synthetic construct
  source 1..108: note = Description of Artificial Sequence: Synthetic polypeptide; note = TGN2122.H[CTLA-4] variable light Chain
ENVLTQSPATLSLSPGERATLSCSASSSVSYMHWYQQKPGQAPRLWIYDTSKLASGIPARFSGSGSRNDYTLTISSLEPEDFAVYYCFPGSGFPFMYTFGGGTKVEIK

SEQ ID NO: 36792 - protein, 10 aa, synthetic construct
  source 1..10: note = Description of Artificial Sequence: Synthetic peptide; note = TGN2122.H[CTLA-4] vlCDR1
SASSSVSYMH

SEQ ID NO: 36793 - protein, 7 aa, synthetic construct
  source 1..7: note = Description of Artificial Sequence: Synthetic peptide; note = TGN2122.H[CTLA-4] vlCDR2
DTSKLAS

SEQ ID NO: 36794 - protein, 11 aa, synthetic construct
  source 1..11: note = Description of Artificial Sequence: Synthetic peptide; note = TGN2122.H[CTLA-4] vlCDR3
FPGSGFPFMYT

SEQ ID NO: 36795 - protein, 123 aa, synthetic construct
  source 1..123: note = Description of Artificial Sequence: Synthetic polypeptide; note = F7[CTLA-4] variable heavy Chain
QVQLVQSGAEVKKPGASVKVSCKASGYAFDGHYMHWVRQAPGQRLEWMGWVDPHSGATNYAQNFQGGVTMTRDTSINTVYMELSSLKSDDTAVYYCARDFYDTSAKSGAFDIWGQGTMVTVSS

SEQ ID NO: 36796 - protein, 5 aa, synthetic construct
  source 1..5: note = Description of Artificial Sequence: Synthetic peptide; note = F7[CTLA-4] vhCDR1
GHYMH

SEQ ID NO: 36797 - protein, 17 aa, synthetic construct
  source 1..17: note = Description of Artificial Sequence: Synthetic peptide; note = F7[CTLA-4] vhCDR2
WVDPHSGATNYAQNFQG

SEQ ID NO: 36798 - protein, 14 aa, synthetic construct
  source 1..14: note = Description of Artificial Sequence: Synthetic peptide; note = F7[CTLA-4] vhCDR3
DFYDTSAKSGAFDI

SEQ ID NO: 36799 - protein, 107 aa, synthetic construct
  source 1..107: note = Description of Artificial Sequence: Synthetic polypeptide; note = F7[CTLA-4] variable light Chain
AIQLTQSPSSVSASVGDRVTITCRASQGISSWLAWYQQKPGKAPKLLIYAASSLQSGVPSRFSGSGSGTDFTLTISSLQPEDFATYYCQQVNSFPWAFGQGTKVEIK

SEQ ID NO: 36800 - protein, 11 aa, synthetic construct
  source 1..11: note = Description of Artificial Sequence: Synthetic peptide; note = F7[CTLA-4] vlCDR1
RASQGISSWLA

SEQ ID NO: 36801 - protein, 7 aa, synthetic construct
  source 1..7: note = Description of Artificial Sequence: Synthetic peptide; note = F7[CTLA-4] vlCDR2
AASSLQS

SEQ ID NO: 36802 - protein, 9 aa, synthetic construct
  source 1..9: note = Description of Artificial Sequence: Synthetic peptide; note = F7[CTLA-4] vlCDR3
QQVNSFPWA

SEQ ID NO: 36803 - protein, 121 aa, synthetic construct
  source 1..121: note = Description of Artificial Sequence: Synthetic polypeptide; note = E8[CTLA-4] variable heavy Chain
QVQLVQSGAEVKKPGASVKVSCEASGYTFTNYYIHWLRQAPGQGLEWMGIINPSGGSTTYAQKFQGRITMTRDTSTNTLYMELSSLRSEDTAIYYCARRDCRGPSCYFAYWGQGTTVTVSS

SEQ ID NO: 36804 - protein, 5 aa, synthetic construct
  source 1..5: note = Description of Artificial Sequence: Synthetic peptide; note = E8[CTLA-4] vhCDR1
NYYIH

SEQ ID NO: 36805 - protein, 17 aa, synthetic construct
  source 1..17: note = Description of Artificial Sequence: Synthetic peptide; note = E8[CTLA-4] vhCDR2
IINPSGGSTTYAQKFQG

SEQ ID NO: 36806 - protein, 12 aa, synthetic construct
  source 1..12: note = Description of Artificial Sequence: Synthetic peptide; note = E8[CTLA-4] vhCDR3
RDCRGPSCYFAY

SEQ ID NO: 36807 - protein, 107 aa, synthetic construct
  source 1..107: note = Description of Artificial Sequence: Synthetic polypeptide; note = E8[CTLA-4] variable light Chain
DIVMTQSPSSLSASVGDRVTITCRASQSISSYLNWYQQKPGKAPKLLIYAASSLQSGVPPRFSGSGSGTEFTLTISSLQPEDFATYYCQQANSFPPTFGQGTKVDIK

SEQ ID NO: 36808 - protein, 11 aa, synthetic construct
  source 1..11: note = Description of Artificial Sequence: Synthetic peptide; note = E8[CTLA-4] vlCDR1
RASQSISSYLN

SEQ ID NO: 36809 - protein, 7 aa, synthetic construct
  source 1..7: note = Description of Artificial Sequence: Synthetic peptide; note = E8[CTLA-4] vlCDR2
AASSLQS

SEQ ID NO: 36810 - protein, 9 aa, synthetic construct
  source 1..9: note = Description of Artificial Sequence: Synthetic peptide; note = E8[CTLA-4] vlCDR3
QQANSFPPT

SEQ ID NO: 36811 - protein, 114 aa, synthetic construct
  source 1..114: note = Description of Artificial Sequence: Synthetic polypeptide; note = CT1E1[CTLA-4] variable heavy Chain
EVQLVESGGGLVQPGRSLRLSCRGSNFNFDDLAISWVRQAPGKGLEWLGFVRSKAYGETTDYVASVKGRFTISRDDSKFIAWLQMDSLKTDDTAVYYCTTFNYWGQGTLVTVSS

SEQ ID NO: 36812 - protein, 5 aa, synthetic construct
  source 1..5: note = Description of Artificial Sequence: Synthetic peptide; note = CT1E1[CTLA-4] vhCDR1
DLAIS

SEQ ID NO: 36813 - protein, 19 aa, synthetic construct
  source 1..19: note = Description of Artificial Sequence: Synthetic peptide; note = CT1E1[CTLA-4] vhCDR2
FVRSKAYGETTDYVASVKG

SEQ ID NO: 36814 - skipped

SEQ ID NO: 36815 - protein, 108 aa, synthetic construct
  source 1..108: note = Description of Artificial Sequence: Synthetic polypeptide; note = CT1E1[CTLA-4] variable light Chain
QPVLTQPPSVSVAPGKTARISCGGNNIASEAVHWYQKKPGQAPVLVIYYDSDRPSGIPERFSGSNSGNTATLRISRVDAGDEADYYCQVWDRTTDQPVFGGGTKLTVL

SEQ ID NO: 36816 - protein, 11 aa, synthetic construct
  source 1..11: note = Description of Artificial Sequence: Synthetic peptide; note = CT1E1[CTLA-4] vlCDR1
GGNNIASEAVH

SEQ ID NO: 36817 - protein, 7 aa, synthetic construct
  source 1..7: note = Description of Artificial Sequence: Synthetic peptide; note = CT1E1[CTLA-4] vlCDR2
YDSDRPS

SEQ ID NO: 36818 - protein, 11 aa, synthetic construct
  source 1..11: note = Description of Artificial Sequence: Synthetic peptide; note = CT1E1[CTLA-4] vlCDR3
QVWDRTTDQPV

SEQ ID NO: 36819 - protein, 120 aa, synthetic construct
  source 1..120: note = Description of Artificial Sequence: Synthetic polypeptide; note = BMS-986016[LAG-3] variable heavy Chain
QVQLQQWGAGLLKPSETLSLTCAVYGGSFSDYYWNWIRQPPGKGLEWIGEINHRGSTNSNPSLKSRVTLSLDTSKNQFSLKLRSVTAADTAVYYCAFGYSDYEYNWFDPWGQGTLVTVSS

SEQ ID NO: 36820 - protein, 5 aa, synthetic construct
  source 1..5: note = Description of Artificial Sequence: Synthetic peptide; note = BMS-986016[LAG-3] vhCDR1
DYYWN

SEQ ID NO: 36821 - protein, 16 aa, synthetic construct
  source 1..16: note = Description of Artificial Sequence: Synthetic peptide; note = BMS-986016[LAG-3] vhCDR2
EINHRGSTNSNPSLKS

SEQ ID NO: 36822 - protein, 12 aa, synthetic construct
  source 1..12: note = Description of Artificial Sequence: Synthetic peptide; note = BMS-986016[LAG-3] vhCDR3
GYSDYEYNWFDP

SEQ ID NO: 36823 - protein, 107 aa, synthetic construct; identical to SEQ ID NO: 17141
  source 1..107: note = Description of Artificial Sequence: Synthetic polypeptide; note = BMS-986016[LAG-3] variable light Chain

SEQ ID NO: 36824 - protein, 11 aa, synthetic construct
  source 1..11: note = Description of Artificial Sequence: Synthetic peptide; note = BMS-986016[LAG-3] vlCDR1
RASQSISSYLA

SEQ ID NO: 36825 - protein, 7 aa, synthetic construct
  source 1..7: note = Description of Artificial Sequence: Synthetic peptide; note = BMS-986016[LAG-3] vlCDR2
DASNRAT

SEQ ID NO: 36826 - protein, 9 aa, synthetic construct
  source 1..9: note = Description of Artificial Sequence: Synthetic peptide; note = BMS-986016[LAG-3] vlCDR3
QQRSNWPLT

SEQ ID NO: 36827 - protein, 116 aa, synthetic construct
  source 1..116: note = Description of Artificial Sequence: Synthetic polypeptide; note = IMP731[LAG-3] variable heavy Chain
QVQLKESGPGLVAPSQSLSITCTVSGFSLTAYGVNWVRQPPGKGLEWLGMIWDDGSTDYNSALKSRLSISKDNSKSQVFLKMNSLQTDDTARYYCAREGDVAFDYWGQGTTLTVSS

SEQ ID NO: 36828 - protein, 5 aa, synthetic construct
  source 1..5: note = Description of Artificial Sequence: Synthetic peptide; note = IMP731[LAG-3] vhCDR1
AYGVN

SEQ ID NO: 36829 - protein, 16 aa, synthetic construct
  source 1..16: note = Description of Artificial Sequence: Synthetic peptide; note = IMP731[LAG-3] vhCDR2
MIWDDGSTDYNSALKS

SEQ ID NO: 36830 - protein, 8 aa, synthetic construct
  source 1..8: note = Description of Artificial Sequence: Synthetic peptide; note = IMP731[LAG-3] vhCDR3
EGDVAFDY

SEQ ID NO: 36831 - protein, 113 aa, synthetic construct
  source 1..113: note = Description of Artificial Sequence: Synthetic polypeptide; note = IMP731[LAG-3] variable light Chain
DIVMTQSPSSLAVSVGQKVTMSCKSSQSLLNGSNQKNYLAWYQQKPGQSPKLLVYFASTRDSGVPDRFIGSGSGTDFTLTISSVQAEDLADYFCLQHFGTPPTFGGGTKLEIK

SEQ ID NO: 36832 - protein, 17 aa, synthetic construct
  source 1..17: note = Description of Artificial Sequence: Synthetic peptide; note = IMP731[LAG-3] vlCDR1
KSSQSLLNGSNQKNYLA

SEQ ID NO: 36833 - protein, 7 aa, synthetic construct
  source 1..7: note = Description of Artificial Sequence: Synthetic peptide; note = IMP731[LAG-3] vlCDR2
FASTRDS

SEQ ID NO: 36834 - protein, 9 aa, synthetic construct
  source 1..9: note = Description of Artificial Sequence: Synthetic peptide; note = IMP731[LAG-3] vlCDR3
LQHFGTPPT

SEQ ID NO: 36835 - protein, 123 aa, synthetic construct
  source 1..123: note = Description of Artificial Sequence: Synthetic polypeptide; note = 13E2[LAG-3] variable heavy Chain
QVTLKESGPGILQPSQTLSLTCSFSGFSLSTSGMGLGWIRQPSGKGLEWLTHIWWDDIKRYNPDLRSRLTISKDTSSSQIFLKIASVDTADTATYYCARIVEGSYSSSYFDVWGAGTTVTVSS

SEQ ID NO: 36836 - protein, 7 aa, synthetic construct
  source 1..7: note = Description of Artificial Sequence: Synthetic peptide; note = 13E2[LAG-3] vhCDR1
TSGMGLG

SEQ ID NO: 36837 - protein, 16 aa, synthetic construct
  source 1..16: note = Description of Artificial Sequence: Synthetic peptide; note = 13E2[LAG-3] vhCDR2
HIWWDDIKRYNPDLRS

SEQ ID NO: 36838 - protein, 13 aa, synthetic construct
  source 1..13: note = Description of Artificial Sequence: Synthetic peptide; note = 13E2[LAG-3] vhCDR3
IVEGSYSSSYFDV

SEQ ID NO: 36839 - protein, 107 aa, synthetic construct
  source 1..107: note = Description of Artificial Sequence: Synthetic polypeptide; note = 13E2[LAG-3] variable light Chain
DIVMTQPHKFMSTSVEDRVTITCKASQDVIFDVAWYQQKPGQSPKLLIYSASSRVSGVPDRFTGSGSGTDFTFTISSVQAEDLAVYYCQQHYSTPYTFGGGTTLEIK

SEQ ID NO: 36840 - protein, 11 aa, synthetic construct
  source 1..11: note = Description of Artificial Sequence: Synthetic peptide; note = 13E2[LAG-3] vlCDR1
KASQDVIFDVA

SEQ ID NO: 36841 - protein, 7 aa, synthetic construct
  source 1..7: note = Description of Artificial Sequence: Synthetic peptide; note = 13E2[LAG-3] vlCDR2
SASSRVS

SEQ ID NO: 36842 - protein, 9 aa, synthetic construct
  source 1..9: note = Description of Artificial Sequence: Synthetic peptide; note = 13E2[LAG-3] vlCDR3
QQHYSTPYT

SEQ ID NO: 36843 - protein, 123 aa, synthetic construct
  source 1..123: note = Description of Artificial Sequence: Synthetic polypeptide; note = 34F4[LAG-3] variable heavy Chain
QVTLKESGPGILQPSQTLSLTCSFSGFSLNTSGMGVGWIRQPSGKGLEWLTHIWWDDVKRYNPALKSRLTISKDTSSSQVFLKIASVDTADTATYYCARIEGDTYYDYYFDYWGQGVTLTVSS

SEQ ID NO: 36844 - protein, 7 aa, synthetic construct
  source 1..7: note = Description of Artificial Sequence: Synthetic peptide; note = 34F4[LAG-3] vhCDR1
TSGMGVG

SEQ ID NO: 36845 - protein, 16 aa, synthetic construct
  source 1..16: note = Description of Artificial Sequence: Synthetic peptide; note = 34F4[LAG-3] vhCDR2
HIWWDDVKRYNPALKS

SEQ ID NO: 36846 - protein, 13 aa, synthetic construct
  source 1..13: note = Description of Artificial Sequence: Synthetic peptide; note = 34F4[LAG-3] vhCDR3
IEGDTYYDYYFDY

SEQ ID NO: 36847 - protein, 107 aa, synthetic construct
  source 1..107: note = Description of Artificial Sequence: Synthetic polypeptide; note = 34F4[LAG-3] variable light Chain
DIVMTQSHKLMSTSVGDGLSITCKASQDVSIAVVWYQQKPGQSPKLLIYSASFRYTGVPDRFTGSGSGTDFTFTISSVQAEDLAVYYCQQHYSIPWTFGGGTKLEIK

SEQ ID NO: 36848 - protein, 11 aa, synthetic construct
  source 1..11: note = Description of Artificial Sequence: Synthetic peptide; note = 34F4[LAG-3] vlCDR1
KASQDVSIAVV

SEQ ID NO: 36849 - protein, 7 aa, synthetic construct
  source 1..7: note = Description of Artificial Sequence: Synthetic peptide; note = 34F4[LAG-3] vlCDR2
SASFRYT

SEQ ID NO: 36850 - protein, 9 aa, synthetic construct
  source 1..9: note = Description of Artificial Sequence: Synthetic peptide; note = 34F4[LAG-3] vlCDR3
QQHYSIPWT

SEQ ID NO: 36851 - protein, 123 aa, synthetic construct
  source 1..123: note = Description of Artificial Sequence: Synthetic polypeptide; note = IMP761[LAG-3] variable heavy Chain
QITLKESGPTLVKPTQTLTLTCTFSGFSLSTSGMGLGWIRQPPGKTLEWLTHIWWDDIKRYNPDLRSRLSITKDTSKNQVVLTMTNMDPLDTGTYYCARIVEGSYSSSYFDVWGQGTLVTVSS

SEQ ID NO: 36852 - protein, 7 aa, synthetic construct
  source 1..7: note = Description of Artificial Sequence: Synthetic peptide; note = IMP761[LAG-3] vhCDR1
TSGMGLG

SEQ ID NO: 36853 - protein, 16 aa, synthetic construct
  source 1..16: note = Description of Artificial Sequence: Synthetic peptide; note = IMP761[LAG-3] vhCDR2
HIWWDDIKRYNPDLRS

SEQ ID NO: 36854 - protein, 13 aa, synthetic construct
  source 1..13: note = Description of Artificial Sequence: Synthetic peptide; note = IMP761[LAG-3] vhCDR3
IVEGSYSSSYFDV

SEQ ID NO: 36855 - protein, 107 aa, synthetic construct
  source 1..107: note = Description of Artificial Sequence: Synthetic polypeptide; note = IMP761[LAG-3] variable light Chain
DIVMTQTPSSLSASVGDRVTITCKASQDVIFDVAWYQQRPGQAPKLLIYSASSRVSGVPSRFSGSGSGTDFTLTISSLQPEDFATYYCQQHYSTPYTFGQGTRLDIK

SEQ ID NO: 36856 - protein, 11 aa, synthetic construct
  source 1..11: note = Description of Artificial Sequence: Synthetic peptide; note = IMP761[LAG-3] vlCDR1
KASQDVIFDVA

SEQ ID NO: 36857 - protein, 7 aa, synthetic construct
  source 1..7: note = Description of Artificial Sequence: Synthetic peptide; note = IMP761[LAG-3] vlCDR2
SASSRVS

SEQ ID NO: 36858 - protein, 9 aa, synthetic construct
  source 1..9: note = Description of Artificial Sequence: Synthetic peptide; note = IMP761[LAG-3] vlCDR3
QQHYSTPYT

SEQ ID NO: 36859 - protein, 116 aa, synthetic construct
  source 1..116: note = Description of Artificial Sequence: Synthetic polypeptide; note = H5L7[LAG-3] variable heavy Chain
QVQLQESGPGLVKPSETLSLTCTVSGFSLTAYGVNWIRQPPGKGLEWIGMIWDDGSTDYDSALKSRVTISVDTSKNQFSLKLSSVTAADTAVYYCAREGDVAFDYWGQGTLVTVSS

SEQ ID NO: 36860 - protein, 5 aa, synthetic construct
  source 1..5: note = Description of Artificial Sequence: Synthetic peptide; note = H5L7[LAG-3] vhCDR1
AYGVN

SEQ ID NO: 36861 - protein, 16 aa, synthetic construct
  source 1..16: note = Description of Artificial Sequence: Synthetic peptide; note = H5L7[LAG-3] vhCDR2
MIWDDGSTDYDSALKS

SEQ ID NO: 36862 - protein, 8 aa, synthetic construct
  source 1..8: note = Description of Artificial Sequence: Synthetic peptide; note = H5L7[LAG-3] vhCDR3
EGDVAFDY

SEQ ID NO: 36863 - protein, 113 aa, synthetic construct
  source 1..113: note = Description of Artificial Sequence: Synthetic polypeptide; note = H5L7[LAG-3] variable light Chain
DIQMTQSPSSLSASVGDRVTITCKSSQSLLNPSNQKNYLAWYQQKPGKAPKLLVYFASTRDSGVPSRFSGSGSGTDFTLTISSLQPEDFATYYCLQHFGTPPTFGQGTKLEIK

SEQ ID NO: 36864 - protein, 17 aa, synthetic construct
  source 1..17: note = Description of Artificial Sequence: Synthetic peptide; note = H5L7[LAG-3] vlCDR1
KSSQSLLNPSNQKNYLA

SEQ ID NO: 36865 - protein, 7 aa, synthetic construct
  source 1..7: note = Description of Artificial Sequence: Synthetic peptide; note = H5L7[LAG-3] vlCDR2
FASTRDS

SEQ ID NO: 36866 - protein, 9 aa, synthetic construct
  source 1..9: note = Description of Artificial Sequence: Synthetic peptide; note = H5L7[LAG-3] vlCDR3
LQHFGTPPT

SEQ ID NO: 36867 - protein, 119 aa, synthetic construct
  source 1..119: note = Description of Artificial Sequence: Synthetic polypeptide; note = hu22D2[LAG-3] variable heavy Chain
QMQLVQSGPEVKKPGTSVKVSCKASGYTFTDYNVDWVRQARGQRLEWIGDINPNNGGTIYAQKFQERVTITVDKSTSTAYMELSSLRSEDTAVYYCARNYRWFGAMDHWGQGTTVTVSS

SEQ ID NO: 36868 - protein, 5 aa, synthetic construct
  source 1..5: note = Description of Artificial Sequence: Synthetic peptide; note = hu22D2[LAG-3] vhCDR1
DYNVD

SEQ ID NO: 36869 - protein, 17 aa, synthetic construct
  source 1..17: note = Description of Artificial Sequence: Synthetic peptide; note = hu22D2[LAG-3] vhCDR2
DINPNNGGTIYAQKFQE

SEQ ID NO: 36870 - protein, 10 aa, synthetic construct
  source 1..10: note = Description of Artificial Sequence: Synthetic peptide; note = hu22D2[LAG-3] vhCDR3
NYRWFGAMDH

SEQ ID NO: 36871 - protein, 111 aa, synthetic construct
  source 1..111: note = Description of Artificial Sequence: Synthetic polypeptide; note = hu22D2[LAG-3] variable light Chain
DIVMTQTPLSLSVTPGQPASISCKASQSLDYEGDSDMNWYLQKPGQPPQLLIYGASNLESGVPDRFSGSGSGTDFTLKISRVEAEDVGVYYCQQSTEDPRTFGGGTKVEIK

SEQ ID NO: 36872 - protein, 15 aa, synthetic construct
  source 1..15: note = Description of Artificial Sequence: Synthetic peptide; note = hu22D2[LAG-3] vlCDR1
KASQSLDYEGDSDMN

SEQ ID NO: 36873 - protein, 7 aa, synthetic construct
  source 1..7: note = Description of Artificial Sequence: Synthetic peptide; note = hu22D2[LAG-3] vlCDR2
GASNLES

SEQ ID NO: 36874 - protein, 9 aa, synthetic construct
  source 1..9: note = Description of Artificial Sequence: Synthetic peptide; note = hu22D2[LAG-3] vlCDR3
QQSTEDPRT

SEQ ID NO: 36875 - protein, 123 aa, synthetic construct
  source 1..123: note = Description of Artificial Sequence: Synthetic polypeptide; note = H4sH15482P[LAG-3] variable heavy Chain
QVQLVESGGGVVQPGRSLRLSCVASGFTFSSYGMHWVRQAPGKGLEWVAIIWYDGSNKYYADSVKGRFTISRDNSKNTQYLQMNSLRAEDTAVYYCASVATSGDFDYYGMDVWGQGTTVTVSS

SEQ ID NO: 36876 - protein, 5 aa, synthetic construct
  source 1..5: note = Description of Artificial Sequence: Synthetic peptide; note = H4sH15482P[LAG-3] vhCDR1
SYGMH

SEQ ID NO: 36877 - protein, 17 aa, synthetic construct
  source 1..17: note = Description of Artificial Sequence: Synthetic peptide; note = H4sH15482P[LAG-3] vhCDR2
IIWYDGSNKYYADSVKG

SEQ ID NO: 36878 - protein, 14 aa, synthetic construct
  source 1..14: note = Description of Artificial Sequence: Synthetic peptide; note = H4sH15482P[LAG-3] vhCDR3
VATSGDFDYYGMDV

SEQ ID NO: 36879 - protein, 107 aa, synthetic construct
  source 1..107: note = Description of Artificial Sequence: Synthetic polypeptide; note = H4sH15482P[LAG-3] variable light Chain
EIVLTQSPATLSLSPGERTTLSCRASQRISTYLAWYQQKPGQAPRLLIYDASKRATGIPARFSGSGSGTGFTLTISSLEPEDFAVYYCQQRSNWPLTFGGGTKVEIK

SEQ ID NO: 36880 - protein, 11 aa, synthetic construct
  source 1..11: note = Description of Artificial Sequence: Synthetic peptide; note = H4sH15482P[LAG-3] vlCDR1
RASQRISTYLA

SEQ ID NO: 36881 - protein, 7 aa, synthetic construct
  source 1..7: note = Description of Artificial Sequence: Synthetic peptide; note = H4sH15482P[LAG-3] vlCDR2
DASKRAT

SEQ ID NO: 36882 - protein, 9 aa, synthetic construct
  source 1..9: note = Description of Artificial Sequence: Synthetic peptide; note = H4sH15482P[LAG-3] vlCDR3
QQRSNWPLT

SEQ ID NO: 36883 - protein, 119 aa, synthetic construct
  source 1..119: note = Description of Artificial Sequence: Synthetic polypeptide; note = L35D4[LAG-3] variable heavy Chain
QVQLVQSGAEVKKPGASVKVSCKASGYTFTSYYMHWVRQAPGQGLEWMGIINPSAGSTSYAQKFQGRVTMTRDTSTSTVYMELSSLRSEDTAVYYCARELMATGGFDYWGQGTLVTVSS

SEQ ID NO: 36884 - protein, 5 aa, synthetic construct
  source 1..5: note = Description of Artificial Sequence: Synthetic peptide; note = L35D4[LAG-3] vhCDR1
SYYMH

SEQ ID NO: 36885 - protein, 17 aa, synthetic construct
  source 1..17: note = Description of Artificial Sequence: Synthetic peptide; note = L35D4[LAG-3] vhCDR2
IINPSAGSTSYAQKFQG

SEQ ID NO: 36886 - protein, 10 aa, synthetic construct
  source 1..10: note = Description of Artificial Sequence: Synthetic peptide; note = L35D4[LAG-3] vhCDR3
ELMATGGFDY

SEQ ID NO: 36887 - protein, 112 aa, synthetic construct
  source 1..112: note = Description of Artificial Sequence: Synthetic polypeptide; note = L35D4[LAG-3] variable light Chain
QSVLTQPPSASGSPGQSVTISCTGTSSDVGGYNYVSWYQQYPGKAPRLMIFEVTERASGVPDRFSGSKSGNTASLTVSGLQTEDEAVYFCSSYSGSNNPGAMFGGGTKLTVL

SEQ ID NO: 36888 - protein, 14 aa, synthetic construct
  source 1..14: note = Description of Artificial Sequence: Synthetic peptide; note = L35D4[LAG-3] vlCDR1
TGTSSDVGGYNYVS

SEQ ID NO: 36889 - protein, 7 aa, synthetic construct
  source 1..7: note = Description of Artificial Sequence: Synthetic peptide; note = L35D4[LAG-3] vlCDR2
EVTERAS

SEQ ID NO: 36890 - protein, 12 aa, synthetic construct
  source 1..12: note = Description of Artificial Sequence: Synthetic peptide; note = L35D4[LAG-3] vlCDR3
SSYSGSNNPGAM

SEQ ID NO: 36891 - protein, 119 aa, synthetic construct; identical to SEQ ID NO: 36883
  source 1..119: note = Description of Artificial Sequence: Synthetic polypeptide; note = L35G6[LAG-3] variable heavy Chain

SEQ ID NO: 36892 - protein, 5 aa, synthetic construct
  source 1..5: note = Description of Artificial Sequence: Synthetic peptide; note = L35G6[LAG-3] vhCDR1
SYYMH

SEQ ID NO: 36893 - protein, 17 aa, synthetic construct
  source 1..17: note = Description of Artificial Sequence: Synthetic peptide; note = L35G6[LAG-3] vhCDR2
IINPSAGSTSYAQKFQG

SEQ ID NO: 36894 - protein, 10 aa, synthetic construct
  source 1..10: note = Description of Artificial Sequence: Synthetic peptide; note = L35G6[LAG-3] vhCDR3
ELMATGGFDY

SEQ ID NO: 36895 - protein, 110 aa, synthetic construct
  source 1..110: note = Description of Artificial Sequence: Synthetic polypeptide; note = L35G6[LAG-3] variable light Chain
QAGLTQPASVSGSPGQSITISCTGSSSDVGGYSYVSWYQKHPGKAPKLMIYDVTNRPSGVSNRFSGSKSGNTASLTISGLQAEDEADYYCSTYTRSNTLVFGPGTKVTVL

SEQ ID NO: 36896 - protein, 14 aa, synthetic construct
  source 1..14: note = Description of Artificial Sequence: Synthetic peptide; note = L35G6[LAG-3] vlCDR1
TGSSSDVGGYSYVS

SEQ ID NO: 36897 - protein, 7 aa, synthetic construct
  source 1..7: note = Description of Artificial Sequence: Synthetic peptide; note = L35G6[LAG-3] vlCDR2
DVTNRPS

SEQ ID NO: 36898 - protein, 10 aa, synthetic construct
  source 1..10: note = Description of Artificial Sequence: Synthetic peptide; note = L35G6[LAG-3] vlCDR3
STYTRSNTLV

SEQ ID NO: 36899 - protein, 119 aa, synthetic construct; identical to SEQ ID NO: 36883
  source 1..119: note = Description of Artificial Sequence: Synthetic polypeptide; note = L33H11[LAG-3] variable heavy Chain

SEQ ID NO: 36900 - protein, 5 aa, synthetic construct
  source 1..5: note = Description of Artificial Sequence: Synthetic peptide; note = L33H11[LAG-3] vhCDR1
SYYMH

SEQ ID NO: 36901 - protein, 17 aa, synthetic construct
  source 1..17: note = Description of Artificial Sequence: Synthetic peptide; note = L33H11[LAG-3] vhCDR2
IINPSAGSTSYAQKFQG

SEQ ID NO: 36902 - protein, 10 aa, synthetic construct
  source 1..10: note = Description of Artificial Sequence: Synthetic peptide; note = L33H11[LAG-3] vhCDR3
ELMATGGFDY

SEQ ID NO: 36903 - protein, 110 aa, synthetic construct
  source 1..110: note = Description of Artificial Sequence: Synthetic polypeptide; note = L33H11[LAG-3] variable light Chain
LPVLTQPASVSGSPGQSITISCTGTSSDVGGYNYVSWYQQHPGKAPKLMIYDVTNRPSGVSNRFSGSKSGNTASLTISGLQAEDEADYYCSSYTSSNTLLFGGGTQLTVL

SEQ ID NO: 36904 - protein, 14 aa, synthetic construct
  source 1..14: note = Description of Artificial Sequence: Synthetic peptide; note = L33H11[LAG-3] vlCDR1
TGTSSDVGGYNYVS

SEQ ID NO: 36905 - protein, 7 aa, synthetic construct
  source 1..7: note = Description of Artificial Sequence: Synthetic peptide; note = L33H11[LAG-3] vlCDR2
DVTNRPS

SEQ ID NO: 36906 - protein, 10 aa, synthetic construct
  source 1..10: note = Description of Artificial Sequence: Synthetic peptide; note = L33H11[LAG-3] vlCDR3
SSYTSSNTLL

SEQ ID NO: 36907 - protein, 119 aa, synthetic construct; identical to SEQ ID NO: 36883
  source 1..119: note = Description of Artificial Sequence: Synthetic polypeptide; note = L32A9[LAG-3] variable heavy Chain

SEQ ID NO: 36908 - protein, 5 aa, synthetic construct
  source 1..5: note = Description of Artificial Sequence: Synthetic peptide; note = L32A9[LAG-3] vhCDR1
SYYMH

SEQ ID NO: 36909 - protein, 17 aa, synthetic construct
  source 1..17: note = Description of Artificial Sequence: Synthetic peptide; note = L32A9[LAG-3] vhCDR2
IINPSAGSTSYAQKFQG

SEQ ID NO: 36910 - protein, 10 aa, synthetic construct
  source 1..10: note = Description of Artificial Sequence: Synthetic peptide; note = L32A9[LAG-3] vhCDR3
ELMATGGFDY

SEQ ID NO: 36911 - protein, 110 aa, synthetic construct
  source 1..110: note = Description of Artificial Sequence: Synthetic polypeptide; note = L32A9[LAG-3] variable light Chain
QSVVTQPPSVSAAPGQKVTISCSGSSSNIGNNYVSWYQQLPGTAPKLLIYDNNKRHSGIPDRFSGSTSDTSATLGITRLQTGDEADYYCGTWDSSLSAYVFGTGTKVTVL

SEQ ID NO: 36912 - protein, 13 aa, synthetic construct
  source 1..13: note = Description of Artificial Sequence: Synthetic peptide; note = L32A9[LAG-3] vlCDR1
SGSSSNIGNNYVS

SEQ ID NO: 36913 - protein, 7 aa, synthetic construct
  source 1..7: note = Description of Artificial Sequence: Synthetic peptide; note = L32A9[LAG-3] vlCDR2
DNNKRHS

SEQ ID NO: 36914 - protein, 11 aa, synthetic construct
  source 1..11: note = Description of Artificial Sequence: Synthetic peptide; note = L32A9[LAG-3] vlCDR3
GTWDSSLSAYV

SEQ ID NO: 36915 - protein, 119 aa, synthetic construct; identical to SEQ ID NO: 36883
  source 1..119: note = Description of Artificial Sequence: Synthetic polypeptide; note = L32D10[LAG-3] variable heavy Chain

SEQ ID NO: 36916 - protein, 5 aa, synthetic construct
  source 1..5: note = Description of Artificial Sequence: Synthetic peptide; note = L32D10[LAG-3] vhCDR1
SYYMH

SEQ ID NO: 36917 - protein, 17 aa, synthetic construct
  source 1..17: note = Description of Artificial Sequence: Synthetic peptide; note = L32D10[LAG-3] vhCDR2
IINPSAGSTSYAQKFQG

SEQ ID NO: 36918 - protein, 10 aa, synthetic construct
  source 1..10: note = Description of Artificial Sequence: Synthetic peptide; note = L32D10[LAG-3] vhCDR3
ELMATGGFDY

SEQ ID NO: 36919 - protein, 110 aa, synthetic construct
  source 1..110: note = Description of Artificial Sequence: Synthetic polypeptide; note = L32D10[LAG-3] variable light Chain
QSVLTQPPSASGSPGQSVTISCTGTSSDVGGYDYVSWYQQHQGKAPKLMIYDVSNRPSGVSNRFSGSKSGNTASLTISGLQAEDEADYYCSSYTSSTTLVFGGGTKLTVL

SEQ ID NO: 36920 - protein, 14 aa, synthetic construct
  source 1..14: note = Description of Artificial Sequence: Synthetic peptide; note = L32D10[LAG-3] vlCDR1
TGTSSDVGGYDYVS

SEQ ID NO: 36921 - protein, 7 aa, synthetic construct
  source 1..7: note = Description of Artificial Sequence: Synthetic peptide; note = L32D10[LAG-3] vlCDR2
DVSNRPS

SEQ ID NO: 36922 - protein, 10 aa, synthetic construct
  source 1..10: note = Description of Artificial Sequence: Synthetic peptide; note = L32D10[LAG-3] vlCDR3
SSYTSSTTLV

SEQ ID NO: 36923 - protein, 119 aa, synthetic construct; identical to SEQ ID NO: 36883
  source 1..119: note = Description of Artificial Sequence: Synthetic polypeptide; note = L32A4[LAG-3] variable heavy Chain

SEQ ID NO: 36924 - protein, 5 aa, synthetic construct
  source 1..5: note = Description of Artificial Sequence: Synthetic peptide; note = L32A4[LAG-3] vhCDR1
SYYMH

SEQ ID NO: 36925 - protein, 17 aa, synthetic construct
  source 1..17: note = Description of Artificial Sequence: Synthetic peptide; note = L32A4[LAG-3] vhCDR2
IINPSAGSTSYAQKFQG

SEQ ID NO: 36926 - protein, 10 aa, synthetic construct
  source 1..10: note = Description of Artificial Sequence: Synthetic peptide; note = L32A4[LAG-3] vhCDR3
ELMATGGFDY

SEQ ID NO: 36927 - protein, 110 aa, synthetic construct
  source 1..110: note = Description of Artificial Sequence: Synthetic polypeptide; note = L32A4[LAG-3] variable light Chain
QSVLTQPASVSGSPGQSITISCTGTSSDIGAYNFVSWYQQHPGKAPKLMIYGVSNRPSGVSSRFSGSKSGSTASLTISGLQAEDEADYYCSSYTTSGSAVFGTGTKLTVL

SEQ ID NO: 36928 - protein, 14 aa, synthetic construct
  source 1..14: note = Description of Artificial Sequence: Synthetic peptide; note = L32A4[LAG-3] vlCDR1
TGTSSDIGAYNFVS

SEQ ID NO: 36929 - protein, 7 aa, synthetic construct
  source 1..7: note = Description of Artificial Sequence: Synthetic peptide; note = L32A4[LAG-3] vlCDR2
GVSNRPS

SEQ ID NO: 36930 - protein, 10 aa, synthetic construct
  source 1..10: note = Description of Artificial Sequence: Synthetic peptide; note = L32A4[LAG-3] vlCDR3
SSYTTSGSAV

SEQ ID NO: 36931 - protein, 119 aa, synthetic construct
  source 1..119: note = Description of Artificial Sequence: Synthetic polypeptide; note = L3A1[LAG-3] variable heavy Chain
EVQLLESGAEVKKPGASVKVSCKASGYTFTSYYMHWVRQAPGQGLEWMGIINPSAGSTSYAQKFQGRVTMTRDTSTSTVYMELSSLRSEDTAVYYCARELMATGGFDYWGQGTLVTVSS

SEQ ID NO: 36932 - protein, 5 aa, synthetic construct
  source 1..5: note = Description of Artificial Sequence: Synthetic peptide; note = L3A1[LAG-3] vhCDR1
SYYMH

SEQ ID NO: 36933 - protein, 17 aa, synthetic construct
  source 1..17: note = Description of Artificial Sequence: Synthetic peptide; note = L3A1[LAG-3] vhCDR2
IINPSAGSTSYAQKFQG

SEQ ID NO: 36934 - protein, 10 aa, synthetic construct
  source 1..10: note = Description of Artificial Sequence: Synthetic peptide; note = L3A1[LAG-3] vhCDR3
ELMATGGFDY

SEQ ID NO: 36935 - protein, 110 aa, synthetic construct
  source 1..110: note = Description of Artificial Sequence: Synthetic polypeptide; note = L3A1[LAG-3] variable light Chain
QSVLTQPASVSGSPGQSITISCTGTSSDIGAYNFVSWYQQHPGKAPKLMIYGVSNRPSGVSSRFSGSKSGSTASLTITGLQAEDEADYYCSSYTTSGSAVFGTGTKLTVL

SEQ ID NO: 36936 - protein, 14 aa, synthetic construct
  source 1..14: note = Description of Artificial Sequence: Synthetic peptide; note = L3A1[LAG-3] vlCDR1
TGTSSDIGAYNFVS

SEQ ID NO: 36937 - protein, 7 aa, synthetic construct
  source 1..7: note = Description of Artificial Sequence: Synthetic peptide; note = L3A1[LAG-3] vlCDR2
GVSNRPS

SEQ ID NO: 36938 - protein, 10 aa, synthetic construct
  source 1..10: note = Description of Artificial Sequence: Synthetic peptide; note = L3A1[LAG-3] vlCDR3
SSYTTSGSAV

SEQ ID NO: 36939 - protein, 121 aa, synthetic construct
  source 1..121: note = Description of Artificial Sequence: Synthetic polypeptide; note = L3A10[LAG-3] variable heavy Chain
EVQLLESGGGVVQPGRSLRVSCAASGFTFSNHAMHWVRQAPGKGLEWVAVISYDGSKKFYSDSVRGRFTISRDNSKNTLYLQMNSLRPEDTAVYYCAKGAHGYTSGWHDYWGQGTLVTVSS

SEQ ID NO: 36940 - protein, 5 aa, synthetic construct
  source 1..5: note = Description of Artificial Sequence: Synthetic peptide; note = L3A10[LAG-3] vhCDR1
NHAMH

SEQ ID NO: 36941 - protein, 17 aa, synthetic construct
  source 1..17: note = Description of Artificial Sequence: Synthetic peptide; note = L3A10[LAG-3] vhCDR2
VISYDGSKKFYSDSVRG

SEQ ID NO: 36942 - protein, 12 aa, synthetic construct
  source 1..12: note = Description of Artificial Sequence: Synthetic peptide; note = L3A10[LAG-3] vhCDR3
GAHGYTSGWHDY

SEQ ID NO: 36943 - protein, 108 aa, synthetic construct
  source 1..108: note = Description of Artificial Sequence: Synthetic polypeptide; note = L3A10[LAG-3] variable light Chain
DVVMTQSPSSLSASVGDRVSITCRASQNIGRYLNWYQQKPGKAPKLLVSAASSLQGGVPSRFSGSGSGTDFTLTISRLQPEDFATYFCQQTYSSPQCTFGQGTKVDIK

SEQ ID NO: 36944 - protein, 11 aa, synthetic construct
  source 1..11: note = Description of Artificial Sequence: Synthetic peptide; note = L3A10[LAG-3] vlCDR1
RASQNIGRYLN

SEQ ID NO: 36945 - protein, 7 aa, synthetic construct
  source 1..7: note = Description of Artificial Sequence: Synthetic peptide; note = L3A10[LAG-3] vlCDR2
AASSLQG

SEQ ID NO: 36946 - protein, 10 aa, synthetic construct
  source 1..10: note = Description of Artificial Sequence: Synthetic peptide; note = L3A10[LAG-3] vlCDR3
QQTYSSPQCT

SEQ ID NO: 36947 - protein, 121 aa, synthetic construct
  source 1..121: note = Description of Artificial Sequence: Synthetic polypeptide; note = L3C5[LAG-3] variable heavy Chain
QVQLVQSGSELKKPGASVKVSCKASGYTFTNYYMHWVRQAPGQGLEWMGIINPSGGATNYAQKFQGRVTMTRDTSTSTVYMELSSLRSEDTAVYYCARDSGYDLGYGMDVWGQGTLVTVSS

SEQ ID NO: 36948 - protein, 5 aa, synthetic construct
  source 1..5: note = Description of Artificial Sequence: Synthetic peptide; note = L3C5[LAG-3] vhCDR1
NYYMH

SEQ ID NO: 36949 - protein, 17 aa, synthetic construct
  source 1..17: note = Description of Artificial Sequence: Synthetic peptide; note = L3C5[LAG-3] vhCDR2
IINPSGGATNYAQKFQG

SEQ ID NO: 36950 - protein, 12 aa, synthetic construct
  source 1..12: note = Description of Artificial Sequence: Synthetic peptide; note = L3C5[LAG-3] vhCDR3
DSGYDLGYGMDV

SEQ ID NO: 36951 - protein, 110 aa, synthetic construct
  source 1..110: note = Description of Artificial Sequence: Synthetic polypeptide; note = L3C5[LAG-3] variable light Chain
QSVLTQPASVSGSPGQSITISCTGTSSDVGGYNYVSWYQQHPGKAPKLMIYDVSNRPSGASNRFSGSKSGNTASLTISGLQAEDEADYYCSSYTNRNTLLFGGGTKLTVL

SEQ ID NO: 36952 - protein, 14 aa, synthetic construct
  source 1..14: note = Description of Artificial Sequence: Synthetic peptide; note = L3C5[LAG-3] vlCDR1
TGTSSDVGGYNYVS

SEQ ID NO: 36953 - protein, 7 aa, synthetic construct
  source 1..7: note = Description of Artificial Sequence: Synthetic peptide; note = L3C5[LAG-3] vlCDR2
DVSNRPS

SEQ ID NO: 36954 - protein, 10 aa, synthetic construct
  source 1..10: note = Description of Artificial Sequence: Synthetic peptide; note = L3C5[LAG-3] vlCDR3
SSYTNRNTLL

SEQ ID NO: 36955 - protein, 119 aa, synthetic construct; identical to SEQ ID NO: 36931
  source 1..119: note = Description of Artificial Sequence: Synthetic polypeptide; note = L3E3[LAG-3] variable heavy Chain

SEQ ID NO: 36956 - protein, 5 aa, synthetic construct
  source 1..5: note = Description of Artificial Sequence: Synthetic peptide; note = L3E3[LAG-3] vhCDR1
SYYMH

SEQ ID NO: 36957 - protein, 17 aa, synthetic construct
  source 1..17: note = Description of Artificial Sequence: Synthetic peptide; note = L3E3[LAG-3] vhCDR2
IINPSAGSTSYAQKFQG

SEQ ID NO: 36958 - protein, 10 aa, synthetic construct
  source 1..10: note = Description of Artificial Sequence: Synthetic peptide; note = L3E3[LAG-3] vhCDR3
ELMATGGFDY

SEQ ID NO: 36959 - protein, 110 aa, synthetic construct
  source 1..110: note = Description of Artificial Sequence: Synthetic polypeptide; note = L3E3[LAG-3] variable light Chain
QSVLTQPASASGSPGQSITISCTGTSSDVGGYNYVSWYQQHPGKAPKLMIYDVSNRPSGVSNRFSGSKSGNTASLTISGLQAEDEANYYCSSYTSSSTNVFGTGTKVTVL

SEQ ID NO: 36960 - protein, 14 aa, synthetic construct
  source 1..14: note = Description of Artificial Sequence: Synthetic peptide; note = L3E3[LAG-3] vlCDR1
TGTSSDVGGYNYVS

SEQ ID NO: 36961 - protein, 7 aa, synthetic construct
  source 1..7: note = Description of Artificial Sequence: Synthetic peptide; note = L3E3[LAG-3] vlCDR2
DVSNRPS

SEQ ID NO: 36962 - protein, 10 aa, synthetic construct
  source 1..10: note = Description of Artificial Sequence: Synthetic peptide; note = L3E3[LAG-3] vlCDR3
SSYTSSSTNV

SEQ ID NO: 36963 - protein, 121 aa, synthetic construct
  source 1..121: note = Description of Artificial Sequence: Synthetic polypeptide; note = durvalumab[PD-L1] variable heavy Chain
EVQLVESGGGLVQPGGSLRLSCAASGFTFSRYWMSWVRQAPGKGLEWVANIKQDGSEKYYVDSVKGRFTISRDNAKNSLYLQMNSLRAEDTAVYYCAREGGWFGELAFDYWGQGTLVTVSS

SEQ ID NO: 36964 - protein, 5 aa, synthetic construct
  source 1..5: note = Description of Artificial Sequence: Synthetic peptide; note = durvalumab[PD-L1] vhCDR1
RYWMS

SEQ ID NO: 36965 - protein, 17 aa, synthetic construct
  source 1..17: note = Description of Artificial Sequence: Synthetic peptide; note = durvalumab[PD-L1] vhCDR2
NIKQDGSEKYYVDSVKG

SEQ ID NO: 36966 - protein, 12 aa, synthetic construct
  source 1..12: note = Description of Artificial Sequence: Synthetic peptide; note = durvalumab[PD-L1] vhCDR3
EGGWFGELAFDY

SEQ ID NO: 36967 - protein, 108 aa, synthetic construct
  source 1..108: note = Description of Artificial Sequence: Synthetic polypeptide; note = durvalumab[PD-L1] variable light Chain
EIVLTQSPGTLSLSPGERATLSCRASQRVSSSYLAWYQQKPGQAPRLLIYDASSRATGIPDRFSGSGSGTDFTLTISRLEPEDFAVYYCQQYGSLPWTFGQGTKVEIK

SEQ ID NO: 36968 - protein, 12 aa, synthetic construct
  source 1..12: note = Description of Artificial Sequence: Synthetic peptide; note = durvalumab[PD-L1] vlCDR1
RASQRVSSSYLA

SEQ ID NO: 36969 - protein, 7 aa, synthetic construct
  source 1..7: note = Description of Artificial Sequence: Synthetic peptide; note = durvalumab[PD-L1] vlCDR2
DASSRAT

SEQ ID NO: 36970 - protein, 9 aa, synthetic construct
  source 1..9: note = Description of Artificial Sequence: Synthetic peptide; note = durvalumab[PD-L1] vlCDR3
QQYGSLPWT

SEQ ID NO: 36971 - protein, 118 aa, synthetic construct
  source 1..118: note = Description of Artificial Sequence: Synthetic polypeptide; note = atezolizumab[PD-L1] variable heavy Chain
EVQLVESGGGLVQPGGSLRLSCAASGFTFSDSWIHWVRQAPGKGLEWVAWISPYGGSTYYADSVKGRFTISADTSKNTAYLQMNSLRAEDTAVYYCARRHWPGGFDYWGQGTLVTVSA

SEQ ID NO: 36972 - protein, 5 aa, synthetic construct
  source 1..5: note = Description of Artificial Sequence: Synthetic peptide; note = atezolizumab[PD-L1] vhCDR1
DSWIH

SEQ ID NO: 36973 - protein, 17 aa, synthetic construct
  source 1..17: note = Description of Artificial Sequence: Synthetic peptide; note = atezolizumab[PD-L1] vhCDR2
WISPYGGSTYYADSVKG

SEQ ID NO: 36974 - protein, 9 aa, synthetic construct
  source 1..9: note = Description of Artificial Sequence: Synthetic peptide; note = atezolizumab[PD-L1] vhCDR3
RHWPGGFDY

SEQ ID NO: 36975 - protein, 108 aa, synthetic construct
  source 1..108: note = Description of Artificial Sequence: Synthetic polypeptide; note = atezolizumab[PD-L1] variable light Chain
DIQMTQSPSSLSASVGDRVTITCRASQDVSTAVAWYQQKPGKAPKLLIYSASFLYSGVPSRFSGSGSGTDFTLTISSLQPEDFATYYCQQYLYHPATFGQGTKVEIKR

SEQ ID NO: 36976 - protein, 11 aa, synthetic construct
  source 1..11: note = Description of Artificial Sequence: Synthetic peptide; note = atezolizumab[PD-L1] vlCDR1
RASQDVSTAVA

SEQ ID NO: 36977 - protein, 7 aa, synthetic construct
  source 1..7: note = Description of Artificial Sequence: Synthetic peptide; note = atezolizumab[PD-L1] vlCDR2
SASFLYS

SEQ ID NO: 36978 - protein, 9 aa, synthetic construct
  source 1..9: note = Description of Artificial Sequence: Synthetic peptide; note = atezolizumab[PD-L1] vlCDR3
QQYLYHPAT

SEQ ID NO: 36979 - protein, 120 aa, synthetic construct
  source 1..120: note = Description of Artificial Sequence: Synthetic polypeptide; note = A09-246-2[PD-L1] variable heavy Chain
EVQLLESGGGLVQPGGSLRLSCAASGFTFSSYIMMWVRQAPGKGLEWVSSIYPSGGITFYADTVKGRFTISRDNSKNTLYLQMNSLRAEDTAVYYCARIKLGTVTTVDYWGQGTLVTVSS

SEQ ID NO: 36980 - protein, 5 aa, synthetic construct
  source 1..5: note = Description of Artificial Sequence: Synthetic peptide; note = A09-246-2[PD-L1] vhCDR1
SYIMM

SEQ ID NO: 36981 - protein, 17 aa, synthetic construct
  source 1..17: note = Description of Artificial Sequence: Synthetic peptide; note = A09-246-2[PD-L1] vhCDR2
SIYPSGGITFYADTVKG

SEQ ID NO: 36982 - protein, 11 aa, synthetic construct
  source 1..11: note = Description of Artificial Sequence: Synthetic peptide; note = A09-246-2[PD-L1] vhCDR3
IKLGTVTTVDY

SEQ ID NO: 36983 - protein, 110 aa, synthetic construct
  source 1..110: note = Description of Artificial Sequence: Synthetic polypeptide; note = A09-246-2[PD-L1] variable light Chain
QSALTQPASVSGSPGQSITISCTGTSSDVGGYNYVSWYQQHPGKAPKLMIYDVSNRPSGVSNRFSGSKSGNTASLTISGLQAEDEADYYCSSYTSSSTRVFGTGTKVTVL

SEQ ID NO: 36984 - protein, 14 aa, synthetic construct
  source 1..14: note = Description of Artificial Sequence: Synthetic peptide; note = A09-246-2[PD-L1] vlCDR1
TGTSSDVGGYNYVS

SEQ ID NO: 36985 - protein, 7 aa, synthetic construct
  source 1..7: note = Description of Artificial Sequence: Synthetic peptide; note = A09-246-2[PD-L1] vlCDR2
DVSNRPS

SEQ ID NO: 36986 - protein, 10 aa, synthetic construct
  source 1..10: note = Description of Artificial Sequence: Synthetic peptide; note = A09-246-2[PD-L1] vlCDR3
SSYTSSSTRV

SEQ ID NO: 36987 - protein, 123 aa, synthetic construct
  source 1..123: note = Description of Artificial Sequence: Synthetic polypeptide; note = 12A4[PD-L1] variable heavy Chain
QVQLVQSGAEVKKPGSSVKVSCKTSGDTFSTYAISWVRQAPGQGLEWMGGIIPIFGKAHYAQKFQGRVTITADESTSTAYMELSSLRSEDTAVYFCARKFHFVSGSPFGMDVWGQGTTVTVSS

SEQ ID NO: 36988 - protein, 5 aa, synthetic construct
  source 1..5: note = Description of Artificial Sequence: Synthetic peptide; note = 12A4[PD-L1] vhCDR1
TYAIS

SEQ ID NO: 36989 - protein, 17 aa, synthetic construct
  source 1..17: note = Description of Artificial Sequence: Synthetic peptide; note = 12A4[PD-L1] vhCDR2
GIIPIFGKAHYAQKFQG

SEQ ID NO: 36990 - protein, 14 aa, synthetic construct
  source 1..14: note = Description of Artificial Sequence: Synthetic peptide; note = 12A4[PD-L1] vhCDR3
KFHFVSGSPFGMDV

SEQ ID NO: 36991 - protein, 106 aa, synthetic construct
  source 1..106: note = Description of Artificial Sequence: Synthetic polypeptide; note = 12A4[PD-L1] variable light Chain
EIVLTQSPATLSLSPGERATLSCRASQSVSSYLAWYQQKPGQAPRLLIYDASNRATGIPARFSGSGSGTDFTLTISSLEPEDFAVYYCQQRSNWPTFGQGTKVEIK

SEQ ID NO: 36992 - protein, 11 aa, synthetic construct
  source 1..11: note = Description of Artificial Sequence: Synthetic peptide; note = 12A4[PD-L1] vlCDR1
RASQSVSSYLA

SEQ ID NO: 36993 - protein, 7 aa, synthetic construct
  source 1..7: note = Description of Artificial Sequence: Synthetic peptide; note = 12A4[PD-L1] vlCDR2
DASNRAT

SEQ ID NO: 36994 - protein, 8 aa, synthetic construct
  source 1..8: note = Description of Artificial Sequence: Synthetic peptide; note = 12A4[PD-L1] vlCDR3
QQRSNWPT

SEQ ID NO: 36995 - protein, 117 aa, synthetic construct
  source 1..117: note = Description of Artificial Sequence: Synthetic polypeptide; note = 3G10[PD-L1] variable heavy Chain
QVQLVQSGAEVKKPGASVKVSCKASGYTFTDYGFSWVRQAPGQGLEWMGWITAYNGNTNYAQKLQGRVTMTTDTSTSTVYMELRSLRSDDTAVYYCARDYFYGMDVWGQGTTVTVSS

SEQ ID NO: 36996 - protein, 5 aa, synthetic construct
  source 1..5: note = Description of Artificial Sequence: Synthetic peptide; note = 3G10[PD-L1] vhCDR1
DYGFS

SEQ ID NO: 36997 - protein, 17 aa, synthetic construct
  source 1..17: note = Description of Artificial Sequence: Synthetic peptide; note = 3G10[PD-L1] vhCDR2
WITAYNGNTNYAQKLQG

SEQ ID NO: 36998 - protein, 8 aa, synthetic construct
  source 1..8: note = Description of Artificial Sequence: Synthetic peptide; note = 3G10[PD-L1] vhCDR3
DYFYGMDV

SEQ ID NO: 36999 - protein, 107 aa, synthetic construct
  source 1..107: note = Description of Artificial Sequence: Synthetic polypeptide; note = 3G10[PD-L1] variable light Chain
EIVLTQSPATLSLSPGERATLSCRASQSVSSYLVWYQQKPGQAPRLLIYDASNRATGIPARFSGSGSGTDFTLTISSLEPEDFAVYYCQQRSNWPRTFGQGTKVEIK

SEQ ID NO: 37000 - protein, 11 aa, synthetic construct
  source 1..11: note = Description of Artificial Sequence: Synthetic peptide; note = 3G10[PD-L1] vlCDR1
RASQSVSSYLV

SEQ ID NO: 37001 - protein, 7 aa, synthetic construct
  source 1..7: note = Description of Artificial Sequence: Synthetic peptide; note = 3G10[PD-L1] vlCDR2
DASNRAT

SEQ ID NO: 37002 - protein, 9 aa, synthetic construct
  source 1..9: note = Description of Artificial Sequence: Synthetic peptide; note = 3G10[PD-L1] vlCDR3
QQRSNWPRT

SEQ ID NO: 37003 - protein, 118 aa, synthetic construct
  source 1..118: note = Description of Artificial Sequence: Synthetic polypeptide; note = 10A5[PD-L1] variable heavy Chain
QVQLVQSGAEVKKPGASVKVSCKASGYTFTSYDVHWVRQAPGQRLEWMGWLHADTGITKFSQKFQGRVTITRDTSASTAYMELSSLRSEDTAVYYCARERIQLWFDYWGQGTLVTVSS

SEQ ID NO: 37004 - protein, 5 aa, synthetic construct
  source 1..5: note = Description of Artificial Sequence: Synthetic peptide; note = 10A5[PD-L1] vhCDR1
SYDVH

SEQ ID NO: 37005 - protein, 17 aa, synthetic construct
  source 1..17: note = Description of Artificial Sequence: Synthetic peptide; note = 10A5[PD-L1] vhCDR2
WLHADTGITKFSQKFQG

SEQ ID NO: 37006 - protein, 9 aa, synthetic construct
  source 1..9: note = Description of Artificial Sequence: Synthetic peptide; note = 10A5[PD-L1] vhCDR3
ERIQLWFDY

SEQ ID NO: 37007 - protein, 107 aa, synthetic construct
  source 1..107: note = Description of Artificial Sequence: Synthetic polypeptide; note = 10A5[PD-L1] variable light Chain
DIQMTQSPSSLSASVGDRVTITCRASQGISSWLAWYQQKPEKAPKSLIYAASSLQSGVPSRFSGSGSGTDFTLTISSLQPEDFATYYCQQYNSYPYTFGQGTKLEIK

SEQ ID NO: 37008 - protein, 11 aa, synthetic construct
  source 1..11: note = Description of Artificial Sequence: Synthetic peptide; note = 10A5[PD-L1] vlCDR1
RASQGISSWLA

SEQ ID NO: 37009 - protein, 7 aa, synthetic construct
  source 1..7: note = Description of Artificial Sequence: Synthetic peptide; note = 10A5[PD-L1] vlCDR2
AASSLQS

SEQ ID NO: 37010 - protein, 9 aa, synthetic construct
  source 1..9: note = Description of Artificial Sequence: Synthetic peptide; note = 10A5[PD-L1] vlCDR3
QQYNSYPYT

SEQ ID NO: 37011 - protein, 114 aa, synthetic construct
  source 1..114: note = Description of Artificial Sequence: Synthetic polypeptide; note = h3D10 Var 1[PD-L1] variable heavy Chain
QVQLVQSGAEVKKPGASVKVSCKASGYTFPDYYMNWVRQAPGQGLEWMGDIDPNYGGTNYAQKFQGRVTMTRDTSISTAYMELSRLRSDDTAVYYCARGALTDWGQGTMVTVSS

SEQ ID NO: 37012 - protein, 5 aa, synthetic construct
  source 1..5: note = Description of Artificial Sequence: Synthetic peptide; note = h3D10 Var 1[PD-L1] vhCDR1
DYYMN

SEQ ID NO: 37013 - protein, 17 aa, synthetic construct
  source 1..17: note = Description of Artificial Sequence: Synthetic peptide; note = h3D10 Var 1[PD-L1] vhCDR2
DIDPNYGGTNYAQKFQG

SEQ ID NO: 37014 - protein, 5 aa, synthetic construct
  source 1..5: note = Description of Artificial Sequence: Synthetic peptide; note = h3D10 Var 1[PD-L1] vhCDR3
GALTD

SEQ ID NO: 37015 - protein, 106 aa, synthetic construct
  source 1..106: note = Description of Artificial Sequence: Synthetic polypeptide; note = h3D10 Var 1[PD-L1] variable light Chain
EIVLTQSPATLSLSPGERATLSCRASSSVSYIYWFQQKPGQAPRLLIYAAFNRATGIPARFSGSGSGTDYTLTISSLEPEDFAVYYCQQWSNNPLTFGQGTKVEIK

SEQ ID NO: 37016 - protein, 10 aa, synthetic construct
  source 1..10: note = Description of Artificial Sequence: Synthetic peptide; note = h3D10 Var 1[PD-L1] vlCDR1
RASSSVSYIY

SEQ ID NO: 37017 - protein, 7 aa, synthetic construct
  source 1..7: note = Description of Artificial Sequence: Synthetic peptide; note = h3D10 Var 1[PD-L1] vlCDR2
AAFNRAT

SEQ ID NO: 37018 - protein, 9 aa, synthetic construct
  source 1..9: note = Description of Artificial Sequence: Synthetic peptide; note = h3D10 Var 1[PD-L1] vlCDR3
QQWSNNPLT

SEQ ID NO: 37019 - protein, 114 aa, synthetic construct
  source 1..114: note = Description of Artificial Sequence: Synthetic polypeptide; note = h3D10 Var 2[PD-L1] variable heavy Chain
QVQLVQSGAEVKKPGASVKVSCKASGYTFPDYYMNWVRQAPGQSLEWMGDIDPNYGGTNYNQKFQGRVTMTRDTSISTAYMELSRLRSDDTAVYYCARGALTDWGQGTMVTVSS

SEQ ID NO: 37020 - protein, 5 aa, synthetic construct
  source 1..5: note = Description of Artificial Sequence: Synthetic peptide; note = h3D10 Var 2[PD-L1] vhCDR1
DYYMN

SEQ ID NO: 37021 - protein, 17 aa, synthetic construct
  source 1..17: note = Description of Artificial Sequence: Synthetic peptide; note = h3D10 Var 2[PD-L1] vhCDR2
DIDPNYGGTNYNQKFQG

SEQ ID NO: 37022 - protein, 5 aa, synthetic construct
  source 1..5: note = Description of Artificial Sequence: Synthetic peptide; note = h3D10 Var 2[PD-L1] vhCDR3
GALTD

SEQ ID NO: 37023 - protein, 106 aa, synthetic construct
  source 1..106: note = Description of Artificial Sequence: Synthetic polypeptide; note = h3D10 Var 2[PD-L1] variable light Chain
EIVLTQSPATLSLSPGERATLSCRASSSVSYIYWFQQKPGQSPRPLIYAAFNRATGIPARFSGSGSGTDYTLTISSLEPEDFAVYYCQQWSNNPLTFGQGTKVEIK

SEQ ID NO: 37024 - protein, 10 aa, synthetic construct
  source 1..10: note = Description of Artificial Sequence: Synthetic peptide; note = h3D10 Var 2[PD-L1] vlCDR1
RASSSVSYIY

SEQ ID NO: 37025 - protein, 7 aa, synthetic construct
  source 1..7: note = Description of Artificial Sequence: Synthetic peptide; note = h3D10 Var 2[PD-L1] vlCDR2
AAFNRAT

SEQ ID NO: 37026 - protein, 9 aa, synthetic construct
  source 1..9: note = Description of Artificial Sequence: Synthetic peptide; note = h3D10 Var 2[PD-L1] vlCDR3
QQWSNNPLT

SEQ ID NO: 37027 - protein, 114 aa, synthetic construct; identical to SEQ ID NO: 37019
  source 1..114: note = Description of Artificial Sequence: Synthetic polypeptide; note = h3D10 Var 3[PD-L1] variable heavy Chain

SEQ ID NO: 37028 - protein, 5 aa, synthetic construct
  source 1..5: note = Description of Artificial Sequence: Synthetic peptide; note = h3D10 Var 3[PD-L1] vhCDR1
DYYMN

SEQ ID NO: 37029 - protein, 17 aa, synthetic construct
  source 1..17: note = Description of Artificial Sequence: Synthetic peptide; note = h3D10 Var 3[PD-L1] vhCDR2
DIDPNYGGTNYNQKFQG

SEQ ID NO: 37030 - protein, 5 aa, synthetic construct
  source 1..5: note = Description of Artificial Sequence: Synthetic peptide; note = h3D10 Var 3[PD-L1] vhCDR3
GALTD

SEQ ID NO: 37031 - protein, 106 aa, synthetic construct
  source 1..106: note = Description of Artificial Sequence: Synthetic polypeptide; note = h3D10 Var 3[PD-L1] variable light Chain
QIVLTQSPATLSLSPGERATLSCRASSSVSYIYWFQQKPGQSPRPLIYATFNLASGIPARFSGSGSGTSYTLTISRLEPEDFAVYYCQQWSNNPLTFGQGTKVEIK

SEQ ID NO: 37032 - protein, 10 aa, synthetic construct
  source 1..10: note = Description of Artificial Sequence: Synthetic peptide; note = h3D10 Var 3[PD-L1] vlCDR1
RASSSVSYIY

SEQ ID NO: 37033 - protein, 7 aa, synthetic construct
  source 1..7: note = Description of Artificial Sequence: Synthetic peptide; note = h3D10 Var 3[PD-L1] vlCDR2
ATFNLAS

SEQ ID NO: 37034 - protein, 9 aa, synthetic construct
  source 1..9: note = Description of Artificial Sequence: Synthetic peptide; note = h3D10 Var 3[PD-L1] vlCDR3
QQWSNNPLT

SEQ ID NO: 37035 - protein, 114 aa, synthetic construct
  source 1..114: note = Description of Artificial Sequence: Synthetic polypeptide; note = h3D10 Var 4[PD-L1] variable heavy Chain
EVQLVQSGAEVKKPGASVKVSCKASGYTFPDYYMNWVRQAPGQSLEWMGDIDPNYGGTNYNQKFQGRVTMTVDRSSSTAYMELSRLRSDDTAVYYCARGALTDWGQGTMVTVSS

SEQ ID NO: 37036 - protein, 5 aa, synthetic construct
  source 1..5: note = Description of Artificial Sequence: Synthetic peptide; note = h3D10 Var 4[PD-L1] vhCDR1
DYYMN

SEQ ID NO: 37037 - protein, 17 aa, synthetic construct
  source 1..17: note = Description of Artificial Sequence: Synthetic peptide; note = h3D10 Var 4[PD-L1] vhCDR2
DIDPNYGGTNYNQKFQG

SEQ ID NO: 37038 - protein, 5 aa, synthetic construct
  source 1..5: note = Description of Artificial Sequence: Synthetic peptide; note = h3D10 Var 4[PD-L1] vhCDR3
GALTD

SEQ ID NO: 37039 - protein, 106 aa, synthetic construct; identical to SEQ ID NO: 37023
  source 1..106: note = Description of Artificial Sequence: Synthetic polypeptide; note = h3D10 Var 4[PD-L1] variable light Chain

SEQ ID NO: 37040 - protein, 10 aa, synthetic construct
  source 1..10: note = Description of Artificial Sequence: Synthetic peptide; note = h3D10 Var 4[PD-L1] vlCDR1
RASSSVSYIY

SEQ ID NO: 37041 - protein, 7 aa, synthetic construct
  source 1..7: note = Description of Artificial Sequence: Synthetic peptide; note = h3D10 Var 4[PD-L1] vlCDR2
AAFNRAT

SEQ ID NO: 37042 - protein, 9 aa, synthetic construct
  source 1..9: note = Description of Artificial Sequence: Synthetic peptide; note = h3D10 Var 4[PD-L1] vlCDR3
QQWSNNPLT

SEQ ID NO: 37043 - protein, 114 aa, synthetic construct; identical to SEQ ID NO: 37035
  source 1..114: note = Description of Artificial Sequence: Synthetic polypeptide; note = h3D10 Var 5[PD-L1] variable heavy Chain

SEQ ID NO: 37044 - protein, 5 aa, synthetic construct
  source 1..5: note = Description of Artificial Sequence: Synthetic peptide; note = h3D10 Var 5[PD-L1] vhCDR1
DYYMN

SEQ ID NO: 37045 - protein, 17 aa, synthetic construct
  source 1..17: note = Description of Artificial Sequence: Synthetic peptide; note = h3D10 Var 5[PD-L1] vhCDR2
DIDPNYGGTNYNQKFQG

SEQ ID NO: 37046 - protein, 5 aa, synthetic construct
  source 1..5: note = Description of Artificial Sequence: Synthetic peptide; note = h3D10 Var 5[PD-L1] vhCDR3
GALTD

SEQ ID NO: 37047 - protein, 106 aa, synthetic construct; identical to SEQ ID NO: 37031
  source 1..106: note = Description of Artificial Sequence: Synthetic polypeptide; note = h3D10 Var 5[PD-L1] variable light Chain

SEQ ID NO: 37048 - protein, 10 aa, synthetic construct
  source 1..10: note = Description of Artificial Sequence: Synthetic peptide; note = h3D10 Var 5[PD-L1] vlCDR1
RASSSVSYIY

SEQ ID NO: 37049 - protein, 7 aa, synthetic construct
  source 1..7: note = Description of Artificial Sequence: Synthetic peptide; note = h3D10 Var 5[PD-L1] vlCDR2
ATFNLAS

SEQ ID NO: 37050 - protein, 9 aa, synthetic construct
  source 1..9: note = Description of Artificial Sequence: Synthetic peptide; note = h3D10 Var 5[PD-L1] vlCDR3
QQWSNNPLT

SEQ ID NO: 37051 - protein, 114 aa, synthetic construct
  source 1..114: note = Description of Artificial Sequence: Synthetic polypeptide; note = h3D10 Var 6[PD-L1] variable heavy Chain
EVQLVESGGGLVQPGRSLRLSCTASGYTFPDYYMNWVRQAPGKGLEWVGDIDPNYGGTTYAASVKGRFTISVDRSKSIAYLQMSSLKTEDTAVYYCTRGALTDWGQGTMVTVSS

SEQ ID NO: 37052 - protein, 5 aa, synthetic construct
  source 1..5: note = Description of Artificial Sequence: Synthetic peptide; note = h3D10 Var 6[PD-L1] vhCDR1
DYYMN

SEQ ID NO: 37053 - protein, 17 aa, synthetic construct
  source 1..17: note = Description of Artificial Sequence: Synthetic peptide; note = h3D10 Var 6[PD-L1] vhCDR2
DIDPNYGGTTYAASVKG

SEQ ID NO: 37054 - protein, 5 aa, synthetic construct
  source 1..5: note = Description of Artificial Sequence: Synthetic peptide; note = h3D10 Var 6[PD-L1] vhCDR3
GALTD

SEQ ID NO: 37055 - protein, 106 aa, synthetic construct
  source 1..106: note = Description of Artificial Sequence: Synthetic polypeptide; note = h3D10 Var 6[PD-L1] variable light Chain
DIQLTQSPSSLSASVGDRVTITCRASSGVSYIYWFQQKPGKAPKLLIYAAFNLASGVPSRFSGSGSGTEYTLTISSLQPEDFATYYCQQWSNNPLTFGQGTKVEIK

SEQ ID NO: 37056 - protein, 10 aa, synthetic construct
  source 1..10: note = Description of Artificial Sequence: Synthetic peptide; note = h3D10 Var 6[PD-L1] vlCDR1
RASSGVSYIY

SEQ ID NO: 37057 - protein, 7 aa, synthetic construct
  source 1..7: note = Description of Artificial Sequence: Synthetic peptide; note = h3D10 Var 6[PD-L1] vlCDR2
AAFNLAS

SEQ ID NO: 37058 - protein, 9 aa, synthetic construct
  source 1..9: note = Description of Artificial Sequence: Synthetic peptide; note = h3D10 Var 6[PD-L1] vlCDR3
QQWSNNPLT

SEQ ID NO: 37059 - protein, 114 aa, synthetic construct
  source 1..114: note = Description of Artificial Sequence: Synthetic polypeptide; note = h3D10 Var 7[PD-L1] variable heavy Chain
EVQLVESGGGLVQPGRSLRLSCTASGYTFPDYYMNWVRQAPGKGLEWVGDIDPNYGGTTYNASVKGRFTISVDRSKSIAYLQMSSLKTEDTAVYYCARGALTDWGQGTMVTVSS

SEQ ID NO: 37060 - protein, 5 aa, synthetic construct
  source 1..5: note = Description of Artificial Sequence: Synthetic peptide; note = h3D10 Var 7[PD-L1] vhCDR1
DYYMN

SEQ ID NO: 37061 - protein, 17 aa, synthetic construct
  source 1..17: note = Description of Artificial Sequence: Synthetic peptide; note = h3D10 Var 7[PD-L1] vhCDR2
DIDPNYGGTTYNASVKG

SEQ ID NO: 37062 - protein, 5 aa, synthetic construct
  source 1..5: note = Description of Artificial Sequence: Synthetic peptide; note = h3D10 Var 7[PD-L1] vhCDR3
GALTD

SEQ ID NO: 37063 - protein, 106 aa, synthetic construct
  source 1..106: note = Description of Artificial Sequence: Synthetic polypeptide; note = h3D10 Var 7[PD-L1] variable light Chain
DIQLTQSPSSLSASVGDRVTITCRASSGVSYIYWFQQKPGKAPKPLIYAAFNLASGVPSRFSGSGSGTEYTLTISSLQPEDFATYYCQQWSNNPLTFGQGTKVEIK

SEQ ID NO: 37064 - protein, 10 aa, synthetic construct
  source 1..10: note = Description of Artificial Sequence: Synthetic peptide; note = h3D10 Var 7[PD-L1] vlCDR1
RASSGVSYIY

SEQ ID NO: 37065 - protein, 7 aa, synthetic construct
  source 1..7: note = Description of Artificial Sequence: Synthetic peptide; note = h3D10 Var 7[PD-L1] vlCDR2
AAFNLAS

SEQ ID NO: 37066 - protein, 9 aa, synthetic construct
  source 1..9: note = Description of Artificial Sequence: Synthetic peptide; note = h3D10 Var 7[PD-L1] vlCDR3
QQWSNNPLT

SEQ ID NO: 37067 - protein, 114 aa, synthetic construct; identical to SEQ ID NO: 37059
  source 1..114: note = Description of Artificial Sequence: Synthetic polypeptide; note = h3D10 Var 8[PD-L1] variable heavy Chain

SEQ ID NO: 37068 - protein, 5 aa, synthetic construct
  source 1..5: note = Description of Artificial Sequence: Synthetic peptide; note = h3D10 Var 8[PD-L1] vhCDR1
DYYMN

SEQ ID NO: 37069 - protein, 17 aa, synthetic construct
  source 1..17: note = Description of Artificial Sequence: Synthetic peptide; note = h3D10 Var 8[PD-L1] vhCDR2
DIDPNYGGTTYNASVKG

SEQ ID NO: 37070 - protein, 5 aa, synthetic construct
  source 1..5: note = Description of Artificial Sequence: Synthetic peptide; note = h3D10 Var 8[PD-L1] vhCDR3
GALTD

SEQ ID NO: 37071 - protein, 106 aa, synthetic construct
  source 1..106: note = Description of Artificial Sequence: Synthetic polypeptide; note = h3D10 Var 8[PD-L1] variable light Chain
DIQLTQSPSILSASVGDRVTITCRASSSVSYIYWFQQKPGKAPKPLIYATFNLASGVPSRFSGSGSGTSYTLTISSLQPEDFATYYCQQWSNNPLTFGQGTKVEIK

SEQ ID NO: 37072 - protein, 10 aa, synthetic construct
  source 1..10: note = Description of Artificial Sequence: Synthetic peptide; note = h3D10 Var 8[PD-L1] vlCDR1
RASSSVSYIY

SEQ ID NO: 37073 - protein, 7 aa, synthetic construct
  source 1..7: note = Description of Artificial Sequence: Synthetic peptide; note = h3D10 Var 8[PD-L1] vlCDR2
ATFNLAS

SEQ ID NO: 37074 - protein, 9 aa, synthetic construct
  source 1..9: note = Description of Artificial Sequence: Synthetic peptide; note = h3D10 Var 8[PD-L1] vlCDR3
QQWSNNPLT

SEQ ID NO: 37075 - protein, 114 aa, synthetic construct
  source 1..114: note = Description of Artificial Sequence: Synthetic polypeptide; note = h3D10 Var 9[PD-L1] variable heavy Chain
EVQLVESGGGLVQPGRSLRLSCTASGYTFPDYYMNWVRQAPGKGLEWVGDIDPNYGGTTYNQSVKGRFTISVDRSKSIAYLQMSSLKTEDTAVYYCARGALTDWGQGTMVTVSS

SEQ ID NO: 37076 - protein, 5 aa, synthetic construct
  source 1..5: note = Description of Artificial Sequence: Synthetic peptide; note = h3D10 Var 9[PD-L1] vhCDR1
DYYMN

SEQ ID NO: 37077 - protein, 17 aa, synthetic construct
  source 1..17: note = Description of Artificial Sequence: Synthetic peptide; note = h3D10 Var 9[PD-L1] vhCDR2
DIDPNYGGTTYNQSVKG

SEQ ID NO: 37078 - protein, 5 aa, synthetic construct
  source 1..5: note = Description of Artificial Sequence: Synthetic peptide; note = h3D10 Var 9[PD-L1] vhCDR3
GALTD

SEQ ID NO: 37079 - protein, 106 aa, synthetic construct; identical to SEQ ID NO: 37063
  source 1..106: note = Description of Artificial Sequence: Synthetic polypeptide; note = h3D10 Var 9[PD-L1] variable light Chain

SEQ ID NO: 37080 - protein, 10 aa, synthetic construct
  source 1..10: note = Description of Artificial Sequence: Synthetic peptide; note = h3D10 Var 9[PD-L1] vlCDR1
RASSGVSYIY

SEQ ID NO: 37081 - protein, 7 aa, synthetic construct
  source 1..7: note = Description of Artificial Sequence: Synthetic peptide; note = h3D10 Var 9[PD-L1] vlCDR2
AAFNLAS

SEQ ID NO: 37082 - protein, 9 aa, synthetic construct
  source 1..9: note = Description of Artificial Sequence: Synthetic peptide; note = h3D10 Var 9[PD-L1] vlCDR3
QQWSNNPLT

SEQ ID NO: 37083 - protein, 114 aa, synthetic construct; identical to SEQ ID NO: 37075
  source 1..114: note = Description of Artificial Sequence: Synthetic polypeptide; note = h3D10 Var 10[PD-L1] variable heavy Chain

SEQ ID NO: 37084 - protein, 5 aa, synthetic construct
  source 1..5: note = Description of Artificial Sequence: Synthetic peptide; note = h3D10 Var 10[PD-L1] vhCDR1
DYYMN

SEQ ID NO: 37085 - protein, 17 aa, synthetic construct
  source 1..17: note = Description of Artificial Sequence: Synthetic peptide; note = h3D10 Var 10[PD-L1] vhCDR2
DIDPNYGGTTYNQSVKG

SEQ ID NO: 37086 - protein, 5 aa, synthetic construct
  source 1..5: note = Description of Artificial Sequence: Synthetic peptide; note = h3D10 Var 10[PD-L1] vhCDR3
GALTD

SEQ ID NO: 37087 - protein, 106 aa, synthetic construct; identical to SEQ ID NO: 37071
  source 1..106: note = Description of Artificial Sequence: Synthetic polypeptide; note = h3D10 Var 10[PD-L1] variable light Chain

SEQ ID NO: 37088 - protein, 10 aa, synthetic construct
  source 1..10: note = Description of Artificial Sequence: Synthetic peptide; note = h3D10 Var 10[PD-L1] vlCDR1
RASSSVSYIY

SEQ ID NO: 37089 - protein, 7 aa, synthetic construct
  source 1..7: note = Description of Artificial Sequence: Synthetic peptide; note = h3D10 Var 10[PD-L1] vlCDR2
ATFNLAS

SEQ ID NO: 37090 - protein, 9 aa, synthetic construct
  source 1..9: note = Description of Artificial Sequence: Synthetic peptide; note = h3D10 Var 10[PD-L1] vlCDR3
QQWSNNPLT

SEQ ID NO: 37091 - protein, 114 aa, synthetic construct; identical to SEQ ID NO: 37051
  source 1..114: note = Description of Artificial Sequence: Synthetic polypeptide; note = h3D10 Var 11[PD-L1] variable heavy Chain

SEQ ID NO: 37092 - protein, 5 aa, synthetic construct
  source 1..5: note = Description of Artificial Sequence: Synthetic peptide; note = h3D10 Var 11[PD-L1] vhCDR1
DYYMN

SEQ ID NO: 37093 - protein, 17 aa, synthetic construct
  source 1..17: note = Description of Artificial Sequence: Synthetic peptide; note = h3D10 Var 11[PD-L1] vhCDR2
DIDPNYGGTTYAASVKG

SEQ ID NO: 37094 - protein, 5 aa, synthetic construct
  source 1..5: note = Description of Artificial Sequence: Synthetic peptide; note = h3D10 Var 11[PD-L1] vhCDR3
GALTD

SEQ ID NO: 37095 - protein, 106 aa, synthetic construct; identical to SEQ ID NO: 37015
  source 1..106: note = Description of Artificial Sequence: Synthetic polypeptide; note = h3D10 Var 11[PD-L1] variable light Chain

SEQ ID NO: 37096 - protein, 10 aa, synthetic construct
  source 1..10: note = Description of Artificial Sequence: Synthetic peptide; note = h3D10 Var 11[PD-L1] vlCDR1
RASSSVSYIY

SEQ ID NO: 37097 - protein, 7 aa, synthetic construct
  source 1..7: note = Description of Artificial Sequence: Synthetic peptide; note = h3D10 Var 11[PD-L1] vlCDR2
AAFNRAT

SEQ ID NO: 37098 - protein, 9 aa, synthetic construct
  source 1..9: note = Description of Artificial Sequence: Synthetic peptide; note = h3D10 Var 11[PD-L1] vlCDR3
QQWSNNPLT

SEQ ID NO: 37099 - protein, 114 aa, synthetic construct; identical to SEQ ID NO: 37011
  source 1..114: note = Description of Artificial Sequence: Synthetic polypeptide; note = h3D10 Var 12[PD-L1] variable heavy Chain

SEQ ID NO: 37100 - protein, 5 aa, synthetic construct
  source 1..5: note = Description of Artificial Sequence: Synthetic peptide; note = h3D10 Var 12[PD-L1] vhCDR1
DYYMN

SEQ ID NO: 37101 - protein, 17 aa, synthetic construct
  source 1..17: note = Description of Artificial Sequence: Synthetic peptide; note = h3D10 Var 12[PD-L1] vhCDR2
DIDPNYGGTNYAQKFQG

SEQ ID NO: 37102 - protein, 5 aa, synthetic construct
  source 1..5: note = Description of Artificial Sequence: Synthetic peptide; note = h3D10 Var 12[PD-L1] vhCDR3
GALTD

SEQ ID NO: 37103 - protein, 106 aa, synthetic construct; identical to SEQ ID NO: 37055
  source 1..106: note = Description of Artificial Sequence: Synthetic polypeptide; note = h3D10 Var 12[PD-L1] variable light Chain

SEQ ID NO: 37104 - protein, 10 aa, synthetic construct
  source 1..10: note = Description of Artificial Sequence: Synthetic peptide; note = h3D10 Var 12[PD-L1] vlCDR1
RASSGVSYIY

SEQ ID NO: 37105 - protein, 7 aa, synthetic construct
  source 1..7: note = Description of Artificial Sequence: Synthetic peptide; note = h3D10 Var 12[PD-L1] vlCDR2
AAFNLAS

SEQ ID NO: 37106 - protein, 9 aa, synthetic construct
  source 1..9: note = Description of Artificial Sequence: Synthetic peptide; note = h3D10 Var 12[PD-L1] vlCDR3
QQWSNNPLT

SEQ ID NO: 37107 - protein, 114 aa, synthetic construct; identical to SEQ ID NO: 37075
  source 1..114: note = Description of Artificial Sequence: Synthetic polypeptide; note = h3D10 Var 13[PD-L1] variable heavy Chain

SEQ ID NO: 37108 - protein, 5 aa, synthetic construct
  source 1..5: note = Description of Artificial Sequence: Synthetic peptide; note = h3D10 Var 13[PD-L1] vhCDR1
DYYMN

SEQ ID NO: 37109 - protein, 17 aa, synthetic construct
  source 1..17: note = Description of Artificial Sequence: Synthetic peptide; note = h3D10 Var 13[PD-L1] vhCDR2
DIDPNYGGTTYNQSVKG

SEQ ID NO: 37110 - protein, 5 aa, synthetic construct
  source 1..5: note = Description of Artificial Sequence: Synthetic peptide; note = h3D10 Var 13[PD-L1] vhCDR3
GALTD

SEQ ID NO: 37111 - protein, 106 aa, synthetic construct; identical to SEQ ID NO: 37031
  source 1..106: note = Description of Artificial Sequence: Synthetic polypeptide; note = h3D10 Var 13[PD-L1] variable light Chain

SEQ ID NO: 37112 - protein, 10 aa, synthetic construct
  source 1..10: note = Description of Artificial Sequence: Synthetic peptide; note = h3D10 Var 13[PD-L1] vlCDR1
RASSSVSYIY

SEQ ID NO: 37113 - protein, 7 aa, synthetic construct
  source 1..7: note = Description of Artificial Sequence: Synthetic peptide; note = h3D10 Var 13[PD-L1] vlCDR2
ATFNLAS

SEQ ID NO: 37114 - protein, 9 aa, synthetic construct
  source 1..9: note = Description of Artificial Sequence: Synthetic peptide; note = h3D10 Var 13[PD-L1] vlCDR3
QQWSNNPLT

SEQ ID NO: 37115 - protein, 114 aa, synthetic construct; identical to SEQ ID NO: 37035
  source 1..114: note = Description of Artificial Sequence: Synthetic polypeptide; note = h3D10 Var 14[PD-L1] variable heavy Chain

SEQ ID NO: 37116 - protein, 5 aa, synthetic construct
  source 1..5: note = Description of Artificial Sequence: Synthetic peptide; note = h3D10 Var 14[PD-L1] vhCDR1
DYYMN

SEQ ID NO: 37117 - protein, 17 aa, synthetic construct
  source 1..17: note = Description of Artificial Sequence: Synthetic peptide; note = h3D10 Var 14[PD-L1] vhCDR2
DIDPNYGGTNYNQKFQG

SEQ ID NO: 37118 - protein, 5 aa, synthetic construct
  source 1..5: note = Description of Artificial Sequence: Synthetic peptide; note = h3D10 Var 14[PD-L1] vhCDR3
GALTD

SEQ ID NO: 37119 - protein, 106 aa, synthetic construct; identical to SEQ ID NO: 37071
  source 1..106: note = Description of Artificial Sequence: Synthetic polypeptide; note = h3D10 Var 14[PD-L1] variable light Chain

SEQ ID NO: 37120 - protein, 10 aa, synthetic construct
  source 1..10: note = Description of Artificial Sequence: Synthetic peptide; note = h3D10 Var 14[PD-L1] vlCDR1
RASSSVSYIY

SEQ ID NO: 37121 - protein, 7 aa, synthetic construct
  source 1..7: note = Description of Artificial Sequence: Synthetic peptide; note = h3D10 Var 14[PD-L1] vlCDR2
ATFNLAS

SEQ ID NO: 37122 - protein, 9 aa, synthetic construct
  source 1..9: note = Description of Artificial Sequence: Synthetic peptide; note = h3D10 Var 14[PD-L1] vlCDR3
QQWSNNPLT

SEQ ID NO: 37123 - protein, 123 aa, synthetic construct
  source 1..123: note = Description of Artificial Sequence: Synthetic polypeptide; note = Antibody A[PD-L1] variable heavy Chain
QVQLVQSGAEVKKPGSSVKVSCKASGGTFSSYAISWVRQAPGQGLEWMGGIIPIFGTANYAQKFQGRVTITADKSTSTAYMELSSLRSEDTAVYYCARSPDYSPYYYYGMDVWGQGTTVTVSS

SEQ ID NO: 37124 - protein, 5 aa, synthetic construct
  source 1..5: note = Description of Artificial Sequence: Synthetic peptide; note = Antibody A[PD-L1] vhCDR1
SYAIS

SEQ ID NO: 37125 - protein, 17 aa, synthetic construct
  source 1..17: note = Description of Artificial Sequence: Synthetic peptide; note = Antibody A[PD-L1] vhCDR2
GIIPIFGTANYAQKFQG

SEQ ID NO: 37126 - protein, 14 aa, synthetic construct
  source 1..14: note = Description of Artificial Sequence: Synthetic peptide; note = Antibody A[PD-L1] vhCDR3
SPDYSPYYYYGMDV

SEQ ID NO: 37127 - protein, 111 aa, synthetic construct
  source 1..111: note = Description of Artificial Sequence: Synthetic polypeptide; note = Antibody A[PD-L1] variable light Chain
QSVLTQPPSASGTPGQRVTISCSGSSSNIGSNTVNWYQQLPGTAPKLLIYGNSNRPSGVPDRFSGSKSGTSASLAISGLQSEDEADYYCQSYDSSLSGSVFGGGIKLTVLG

SEQ ID NO: 37128 - protein, 13 aa, synthetic construct
  source 1..13: note = Description of Artificial Sequence: Synthetic peptide; note = Antibody A[PD-L1] vlCDR1
SGSSSNIGSNTVN

SEQ ID NO: 37129 - protein, 7 aa, synthetic construct
  source 1..7: note = Description of Artificial Sequence: Synthetic peptide; note = Antibody A[PD-L1] vlCDR2
GNSNRPS

SEQ ID NO: 37130 - protein, 11 aa, synthetic construct
  source 1..11: note = Description of Artificial Sequence: Synthetic peptide; note = Antibody A[PD-L1] vlCDR3
QSYDSSLSGSV

SEQ ID NO: 37131 - protein, 116 aa, synthetic construct
  source 1..116: note = Description of Artificial Sequence: Synthetic polypeptide; note = C5H9v2[PD-L1] variable heavy Chain
EVQLLESGGGLVQPGGSLRLSCAASGFTFSSYAMSWVRQAPGKGLEWVSSIWRNGIVTVYADSVKGRFTISRDNSKNTLYLQMNSLRAEDTAVYYCAKWSAAFDYWGQGTLVTVSS

SEQ ID NO: 37132 - protein, 5 aa, synthetic construct
  source 1..5: note = Description of Artificial Sequence: Synthetic peptide; note = C5H9v2[PD-L1] vhCDR1
SYAMS

SEQ ID NO: 37133 - protein, 17 aa, synthetic construct
  source 1..17: note = Description of Artificial Sequence: Synthetic peptide; note = C5H9v2[PD-L1] vhCDR2
SIWRNGIVTVYADSVKG

SEQ ID NO: 37134 - protein, 7 aa, synthetic construct
  source 1..7: note = Description of Artificial Sequence: Synthetic peptide; note = C5H9v2[PD-L1] vhCDR3
WSAAFDY

SEQ ID NO: 37135 - protein, 107 aa, synthetic construct
  source 1..107: note = Description of Artificial Sequence: Synthetic polypeptide; note = C5H9v2[PD-L1] variable light Chain
DIQMTQSPSSLSASVGDRVTITCRASQSISSYLNWYQQKPGKAPKLLIYAASSLQSGVPSRFSGSGSGTDFTLTISSLQPEDFATYYCQQDNGYPSTFGGGTKVEIK

SEQ ID NO: 37136 - protein, 11 aa, synthetic construct
  source 1..11: note = Description of Artificial Sequence: Synthetic peptide; note = C5H9v2[PD-L1] vlCDR1
RASQSISSYLN

SEQ ID NO: 37137 - protein, 7 aa, synthetic construct
  source 1..7: note = Description of Artificial Sequence: Synthetic peptide; note = C5H9v2[PD-L1] vlCDR2
AASSLQS

SEQ ID NO: 37138 - protein, 9 aa, synthetic construct
  source 1..9: note = Description of Artificial Sequence: Synthetic peptide; note = C5H9v2[PD-L1] vlCDR3
QQDNGYPST

SEQ ID NO: 37139 - protein, 115 aa, synthetic construct
  source 1..115: note = Description of Artificial Sequence: Synthetic polypeptide; note = humanized 29E.2A3[PD-L1] variable heavy Chain
EVQLVQSGAEVKKPGASVKMSCKASGYTFTSYVMHWVKQAPGQRLEWIGYVNPFNDGTKYNEMFKGRATLTSDKSTSTAYMELSSLRSEDTAVYYCARQAWGYPWGQGTLVTVSS

SEQ ID NO: 37140 - protein, 5 aa, synthetic construct
  source 1..5: note = Description of Artificial Sequence: Synthetic peptide; note = humanized 29E.2A3[PD-L1] vhCDR1
SYVMH

SEQ ID NO: 37141 - protein, 17 aa, synthetic construct
  source 1..17: note = Description of Artificial Sequence: Synthetic peptide; note = humanized 29E.2A3[PD-L1] vhCDR2
YVNPFNDGTKYNEMFKG

SEQ ID NO: 37142 - protein, 6 aa, synthetic construct
  source 1..6: note = Description of Artificial Sequence: Synthetic peptide; note = humanized 29E.2A3[PD-L1] vhCDR3
QAWGYP

SEQ ID NO: 37143 - protein, 111 aa, synthetic construct
  source 1..111: note = Description of Artificial Sequence: Synthetic polypeptide; note = humanized 29E.2A3[PD-L1] variable light Chain
DIVLTQSPATLSLSPGERATLSCRATESVEYYGTSLVQWYQQKPGQPPKLLIYAASSVDSGVPSRFSGSGSGTDFTLTINSLEAEDAATYFCQQSRRVPYTFGQGTKLEIK

SEQ ID NO: 37144 - protein, 15 aa, synthetic construct
  source 1..15: note = Description of Artificial Sequence: Synthetic peptide; note = humanized 29E.2A3[PD-L1] vlCDR1
RATESVEYYGTSLVQ

SEQ ID NO: 37145 - protein, 7 aa, synthetic construct
  source 1..7: note = Description of Artificial Sequence: Synthetic peptide; note = humanized 29E.2A3[PD-L1] vlCDR2
AASSVDS

SEQ ID NO: 37146 - protein, 9 aa, synthetic construct
  source 1..9: note = Description of Artificial Sequence: Synthetic peptide; note = humanized 29E.2A3[PD-L1] vlCDR3
QQSRRVPYT

SEQ ID NO: 37147 - protein, 121 aa, synthetic construct
  source 1..121: note = Description of Artificial Sequence: Synthetic polypeptide; note = 1B9[PD-L1] variable heavy Chain
DVQLQESGPGLVKPSQSLSLTCTVTGYSITSDHAWNWIRQVPGNKLEWMGYITYRGSTTYSPSLKSRISITRDTSKNQFFLQLNSVTTEDTATYYCARSMITTGYYVMDYWGQGTSVTVSS

SEQ ID NO: 37148 - protein, 6 aa, synthetic construct
  source 1..6: note = Description of Artificial Sequence: Synthetic peptide; note = 1B9[PD-L1] vhCDR1
SDHAWN

SEQ ID NO: 37149 - protein, 16 aa, synthetic construct
  source 1..16: note = Description of Artificial Sequence: Synthetic peptide; note = 1B9[PD-L1] vhCDR2
YITYRGSTTYSPSLKS

SEQ ID NO: 37150 - protein, 12 aa, synthetic construct
  source 1..12: note = Description of Artificial Sequence: Synthetic peptide; note = 1B9[PD-L1] vhCDR3
SMITTGYYVMDY

SEQ ID NO: 37151 - protein, 107 aa, synthetic construct
  source 1..107: note = Description of Artificial Sequence: Synthetic polypeptide; note = 1B9[PD-L1] variable light Chain
DIVMTQSHKFMSTSLGDRVTITCKASQDVGISVVWYQQKPGQSPKLLIYWASTRHTGVPDRFTGSGSGTDFTLTINNVQSEDLADYFCQQYSSYPLTVGAGTKLELK

SEQ ID NO: 37152 - protein, 11 aa, synthetic construct
  source 1..11: note = Description of Artificial Sequence: Synthetic peptide; note = 1B9[PD-L1] vlCDR1
KASQDVGISVV

SEQ ID NO: 37153 - protein, 7 aa, synthetic construct
  source 1..7: note = Description of Artificial Sequence: Synthetic peptide; note = 1B9[PD-L1] vlCDR2
WASTRHT

SEQ ID NO: 37154 - protein, 9 aa, synthetic construct
  source 1..9: note = Description of Artificial Sequence: Synthetic peptide; note = 1B9[PD-L1] vlCDR3
QQYSSYPLT

SEQ ID NO: 37155 - protein, 121 aa, synthetic construct
  source 1..121: note = Description of Artificial Sequence: Synthetic polypeptide; note = 4H1[PD-L1] variable heavy Chain
DVQLQESGPGLVKPSQSLSLTCTVTDYSITSDYAWTWIRQFPGNKLEWMGYITYRGTTRYNPSLTSRISFTRDTSKNQLFLQLNSVTTEDTGTYCCARSMITTGYYAMDYWGQGTSVTVSS

SEQ ID NO: 37156 - protein, 6 aa, synthetic construct
  source 1..6: note = Description of Artificial Sequence: Synthetic peptide; note = 4H1[PD-L1] vhCDR1
SDYAWT

SEQ ID NO: 37157 - protein, 16 aa, synthetic construct
  source 1..16: note = Description of Artificial Sequence: Synthetic peptide; note = 4H1[PD-L1] vhCDR2
YITYRGTTRYNPSLTS

SEQ ID NO: 37158 - protein, 12 aa, synthetic construct
  source 1..12: note = Description of Artificial Sequence: Synthetic peptide; note = 4H1[PD-L1] vhCDR3
SMITTGYYAMDY

SEQ ID NO: 37159 - protein, 107 aa, synthetic construct
  source 1..107: note = Description of Artificial Sequence: Synthetic polypeptide; note = 4H1[PD-L1] variable light Chain
DIVMTQSHKFMSTSVGDRVSISCKASQDVGISVAWYQQKPGQSPKLLIYWASTRHTGVPVRFTGSGSGTDFTLTISNVQSEDLADYFCQQYSSYPPTFGAGTKLELK

SEQ ID NO: 37160 - protein, 11 aa, synthetic construct
  source 1..11: note = Description of Artificial Sequence: Synthetic peptide; note = 4H1[PD-L1] vlCDR1
KASQDVGISVA

SEQ ID NO: 37161 - protein, 7 aa, synthetic construct
  source 1..7: note = Description of Artificial Sequence: Synthetic peptide; note = 4H1[PD-L1] vlCDR2
WASTRHT

SEQ ID NO: 37162 - protein, 9 aa, synthetic construct
  source 1..9: note = Description of Artificial Sequence: Synthetic peptide; note = 4H1[PD-L1] vlCDR3
QQYSSYPPT

SEQ ID NO: 37163 - protein, 120 aa, synthetic construct
  source 1..120: note = Description of Artificial Sequence: Synthetic polypeptide; note = mAb-42[PD-L1] variable heavy Chain
QVQLVQSGAEVKKPGSSVKVSCKASGGTFSSYAISWVRQAPGQGLEWMGGIIPIFGTANYAQKFQGRVTITADKSTSTAYMELSSLRSEDTAVYYCARGRQMFGAGIDFWGPGTLVTVSS

SEQ ID NO: 37164 - protein, 5 aa, synthetic construct
  source 1..5: note = Description of Artificial Sequence: Synthetic peptide; note = mAb-42[PD-L1] vhCDR1
SYAIS

SEQ ID NO: 37165 - protein, 17 aa, synthetic construct
  source 1..17: note = Description of Artificial Sequence: Synthetic peptide; note = mAb-42[PD-L1] vhCDR2
GIIPIFGTANYAQKFQG

SEQ ID NO: 37166 - protein, 11 aa, synthetic construct
  source 1..11: note = Description of Artificial Sequence: Synthetic peptide; note = mAb-42[PD-L1] vhCDR3
GRQMFGAGIDF

SEQ ID NO: 37167 - protein, 112 aa, synthetic construct
  source 1..112: note = Description of Artificial Sequence: Synthetic polypeptide; note = mAb-42[PD-L1] variable light Chain
NFMLTQPHSVSESPGKTVTISCTRSSGSIDSNYVQWYQQRPGSAPTTVIYEDNQRPSGVPDRFSGSIDSSSNSASLTISGLKTEDEADYYCQSYDSNNRHVIFGGGTKLTVL

SEQ ID NO: 37168 - protein, 13 aa, synthetic construct
  source 1..13: note = Description of Artificial Sequence: Synthetic peptide; note = mAb-42[PD-L1] vlCDR1
TRSSGSIDSNYVQ

SEQ ID NO: 37169 - protein, 7 aa, synthetic construct
  source 1..7: note = Description of Artificial Sequence: Synthetic peptide; note = mAb-42[PD-L1] vlCDR2
EDNQRPS

SEQ ID NO: 37170 - protein, 11 aa, synthetic construct
  source 1..11: note = Description of Artificial Sequence: Synthetic peptide; note = mAb-42[PD-L1] vlCDR3
QSYDSNNRHVI

SEQ ID NO: 37171 - protein, 120 aa, synthetic construct
  source 1..120: note = Description of Artificial Sequence: Synthetic polypeptide; note = BAP058-03[PD-L1] variable heavy Chain
EVQLVQSGAEVKKPGATVKISCKVSGYTFTSYWMYWVRQATGQGLEWMGRIDPNSGSTKYNEKFKNRVTITADKSTSTAYMELSSLRSEDTAVYYCARDYRKGLYAMDYWGQGTTVTVSS

SEQ ID NO: 37172 - protein, 5 aa, synthetic construct
  source 1..5: note = Description of Artificial Sequence: Synthetic peptide; note = BAP058-03[PD-L1] vhCDR1
SYWMY

SEQ ID NO: 37173 - protein, 17 aa, synthetic construct
  source 1..17: note = Description of Artificial Sequence: Synthetic peptide; note = BAP058-03[PD-L1] vhCDR2
RIDPNSGSTKYNEKFKN

SEQ ID NO: 37174 - protein, 11 aa, synthetic construct
  source 1..11: note = Description of Artificial Sequence: Synthetic peptide; note = BAP058-03[PD-L1] vhCDR3
DYRKGLYAMDY

SEQ ID NO: 37175 - protein, 107 aa, synthetic construct
  source 1..107: note = Description of Artificial Sequence: Synthetic polypeptide; note = BAP058-03[PD-L1] variable light Chain
EIVLTQSPDFQSVTPKEKVTITCKASQDVGTAVAWYLQKPGQSPQLLIYWASTRHTGVPDRFSGSGSGTDFTLKISRVEAEDVGVYYCQQYNSYPLTFGQGTKVEIK

SEQ ID NO: 37176 - protein, 11 aa, synthetic construct
  source 1..11: note = Description of Artificial Sequence: Synthetic peptide; note = BAP058-03[PD-L1] vlCDR1
KASQDVGTAVA

SEQ ID NO: 37177 - protein, 7 aa, synthetic construct
  source 1..7: note = Description of Artificial Sequence: Synthetic peptide; note = BAP058-03[PD-L1] vlCDR2
WASTRHT

SEQ ID NO: 37178 - protein, 9 aa, synthetic construct
  source 1..9: note = Description of Artificial Sequence: Synthetic peptide; note = BAP058-03[PD-L1] vlCDR3
QQYNSYPLT

SEQ ID NO: 37179 - protein, 120 aa, synthetic construct
  source 1..120: note = Description of Artificial Sequence: Synthetic polypeptide; note = BAP058-04[PD-L1] variable heavy Chain
EVQLVQSGAEVKKPGESLRISCKGSGYTFTSYWMYWVRQAPGQGLEWMGRIDPNSGSTKYNEKFKNRVTISVDTSKNQFSLKLSSVTAADTAVYYCARDYRKGLYAMDYWGQGTTVTVSS

SEQ ID NO: 37180 - protein, 5 aa, synthetic construct
  source 1..5: note = Description of Artificial Sequence: Synthetic peptide; note = BAP058-04[PD-L1] vhCDR1
SYWMY

SEQ ID NO: 37181 - protein, 17 aa, synthetic construct
  source 1..17: note = Description of Artificial Sequence: Synthetic peptide; note = BAP058-04[PD-L1] vhCDR2
RIDPNSGSTKYNEKFKN

SEQ ID NO: 37182 - protein, 11 aa, synthetic construct
  source 1..11: note = Description of Artificial Sequence: Synthetic peptide; note = BAP058-04[PD-L1] vhCDR3
DYRKGLYAMDY

SEQ ID NO: 37183 - protein, 107 aa, synthetic construct
  source 1..107: note = Description of Artificial Sequence: Synthetic polypeptide; note = BAP058-04[PD-L1] variable light Chain
EIVLTQSPDFQSVTPKEKVTITCKASQDVGTAVAWYLQKPGQSPQLLIYWASTRHTGVPSRFSGSGSGTDFTFTISSLQPEDIATYYCQQYNSYPLTFGQGTKVEIK

SEQ ID NO: 37184 - protein, 11 aa, synthetic construct
  source 1..11: note = Description of Artificial Sequence: Synthetic peptide; note = BAP058-04[PD-L1] vlCDR1
KASQDVGTAVA

SEQ ID NO: 37185 - protein, 7 aa, synthetic construct
  source 1..7: note = Description of Artificial Sequence: Synthetic peptide; note = BAP058-04[PD-L1] vlCDR2
WASTRHT

SEQ ID NO: 37186 - protein, 9 aa, synthetic construct
  source 1..9: note = Description of Artificial Sequence: Synthetic peptide; note = BAP058-04[PD-L1] vlCDR3
QQYNSYPLT

SEQ ID NO: 37187 - protein, 120 aa, synthetic construct
  source 1..120: note = Description of Artificial Sequence: Synthetic polypeptide; note = BAP058-06[PD-L1] variable heavy Chain
EVQLVQSGAEVKKPGESLRISCKGSGYTFTSYWMYWIRQPPGKGLEWIGRIDPNSGSTKYNEKFKNRVTITADKSTSTAYMELSSLRSEDTAVYYCARDYRKGLYAMDYWGQGTTVTVSS

SEQ ID NO: 37188 - protein, 5 aa, synthetic construct
  source 1..5: note = Description of Artificial Sequence: Synthetic peptide; note = BAP058-06[PD-L1] vhCDR1
SYWMY

SEQ ID NO: 37189 - protein, 17 aa, synthetic construct
  source 1..17: note = Description of Artificial Sequence: Synthetic peptide; note = BAP058-06[PD-L1] vhCDR2
RIDPNSGSTKYNEKFKN

SEQ ID NO: 37190 - protein, 11 aa, synthetic construct
  source 1..11: note = Description of Artificial Sequence: Synthetic peptide; note = BAP058-06[PD-L1] vhCDR3
DYRKGLYAMDY

SEQ ID NO: 37191 - protein, 107 aa, synthetic construct; identical to SEQ ID NO: 37183
  source 1..107: note = Description of Artificial Sequence: Synthetic polypeptide; note = BAP058-06[PD-L1] variable light Chain

SEQ ID NO: 37192 - protein, 11 aa, synthetic construct
  source 1..11: note = Description of Artificial Sequence: Synthetic peptide; note = BAP058-06[PD-L1] vlCDR1
KASQDVGTAVA

SEQ ID NO: 37193 - protein, 7 aa, synthetic construct
  source 1..7: note = Description of Artificial Sequence: Synthetic peptide; note = BAP058-06[PD-L1] vlCDR2
WASTRHT

SEQ ID NO: 37194 - protein, 9 aa, synthetic construct
  source 1..9: note = Description of Artificial Sequence: Synthetic peptide; note = BAP058-06[PD-L1] vlCDR3
QQYNSYPLT

SEQ ID NO: 37195 - protein, 120 aa, synthetic construct
  source 1..120: note = Description of Artificial Sequence: Synthetic polypeptide; note = BAP058-07[PD-L1] variable heavy Chain
QVQLVQSGAEVKKPGASVKVSCKASGYTFTSYWMYWIRQSPSRGLEWLGRIDPNSGSTKYNEKFKNRFTISRDDSKNTAYLQMNSLKTEDTAVYYCARDYRKGLYAMDYWGQGTTVTVSS

SEQ ID NO: 37196 - protein, 5 aa, synthetic construct
  source 1..5: note = Description of Artificial Sequence: Synthetic peptide; note = BAP058-07[PD-L1] vhCDR1
SYWMY

SEQ ID NO: 37197 - protein, 17 aa, synthetic construct
  source 1..17: note = Description of Artificial Sequence: Synthetic peptide; note = BAP058-07[PD-L1] vhCDR2
RIDPNSGSTKYNEKFKN

SEQ ID NO: 37198 - protein, 11 aa, synthetic construct
  source 1..11: note = Description of Artificial Sequence: Synthetic peptide; note = BAP058-07[PD-L1] vhCDR3
DYRKGLYAMDY

SEQ ID NO: 37199 - protein, 107 aa, synthetic construct
  source 1..107: note = Description of Artificial Sequence: Synthetic polypeptide; note = BAP058-07[PD-L1] variable light Chain
EIVLTQSPATLSLSPGERATLSCKASQDVGTAVAWYLQKPGQSPQLLIYWASTRHTGIPPRFSGSGYGTDFTLTINNIESEDAAYYFCQQYNSYPLTFGQGTKVEIK

SEQ ID NO: 37200 - protein, 11 aa, synthetic construct
  source 1..11: note = Description of Artificial Sequence: Synthetic peptide; note = BAP058-07[PD-L1] vlCDR1
KASQDVGTAVA

SEQ ID NO: 37201 - protein, 7 aa, synthetic construct
  source 1..7: note = Description of Artificial Sequence: Synthetic peptide; note = BAP058-07[PD-L1] vlCDR2
WASTRHT

SEQ ID NO: 37202 - protein, 9 aa, synthetic construct
  source 1..9: note = Description of Artificial Sequence: Synthetic peptide; note = BAP058-07[PD-L1] vlCDR3
QQYNSYPLT

SEQ ID NO: 37203 - protein, 120 aa, synthetic construct; identical to SEQ ID NO: 37171
  source 1..120: note = Description of Artificial Sequence: Synthetic polypeptide; note = BAP058-11[PD-L1] variable heavy Chain

SEQ ID NO: 37204 - protein, 5 aa, synthetic construct
  source 1..5: note = Description of Artificial Sequence: Synthetic peptide; note = BAP058-11[PD-L1] vhCDR1
SYWMY

SEQ ID NO: 37205 - protein, 17 aa, synthetic construct
  source 1..17: note = Description of Artificial Sequence: Synthetic peptide; note = BAP058-11[PD-L1] vhCDR2
RIDPNSGSTKYNEKFKN

SEQ ID NO: 37206 - protein, 11 aa, synthetic construct
  source 1..11: note = Description of Artificial Sequence: Synthetic peptide; note = BAP058-11[PD-L1] vhCDR3
DYRKGLYAMDY

SEQ ID NO: 37207 - protein, 107 aa, synthetic construct
  source 1..107: note = Description of Artificial Sequence: Synthetic polypeptide; note = BAP058-11[PD-L1] variable light Chain
DVVMTQSPLSLPVTLGQPASISCKASQDVGTAVAWYQQKPGQAPRLLIYWASTRHTGVPSRFSGSGSGTEFTLTISSLQPDDFATYYCQQYNSYPLTFGQGTKVEIK

SEQ ID NO: 37208 - protein, 11 aa, synthetic construct
  source 1..11: note = Description of Artificial Sequence: Synthetic peptide; note = BAP058-11[PD-L1] vlCDR1
KASQDVGTAVA

SEQ ID NO: 37209 - protein, 7 aa, synthetic construct
  source 1..7: note = Description of Artificial Sequence: Synthetic peptide; note = BAP058-11[PD-L1] vlCDR2
WASTRHT

SEQ ID NO: 37210 - protein, 9 aa, synthetic construct
  source 1..9: note = Description of Artificial Sequence: Synthetic peptide; note = BAP058-11[PD-L1] vlCDR3
QQYNSYPLT

SEQ ID NO: 37211 - protein, 120 aa, synthetic construct
  source 1..120: note = Description of Artificial Sequence: Synthetic polypeptide; note = BAP058-13[PD-L1] variable heavy Chain
EVQLVQSGAEVKKPGATVKISCKVSGYTFTSYWMYWVRQARGQRLEWIGRIDPNSGSTKYNEKFKNRFTISRDNSKNTLYLQMNSLRAEDTAVYYCARDYRKGLYAMDYWGQGTTVTVSS

SEQ ID NO: 37212 - protein, 5 aa, synthetic construct
  source 1..5: note = Description of Artificial Sequence: Synthetic peptide; note = BAP058-13[PD-L1] vhCDR1
SYWMY

SEQ ID NO: 37213 - protein, 17 aa, synthetic construct
  source 1..17: note = Description of Artificial Sequence: Synthetic peptide; note = BAP058-13[PD-L1] vhCDR2
RIDPNSGSTKYNEKFKN

SEQ ID NO: 37214 - protein, 11 aa, synthetic construct
  source 1..11: note = Description of Artificial Sequence: Synthetic peptide; note = BAP058-13[PD-L1] vhCDR3
DYRKGLYAMDY

SEQ ID NO: 37215 - protein, 107 aa, synthetic construct
  source 1..107: note = Description of Artificial Sequence: Synthetic polypeptide; note = BAP058-13[PD-L1] variable light Chain
AIQLTQSPSSLSASVGDRVTITCKASQDVGTAVAWYLQKPGQSPQLLIYWASTRHTGVPSRFSGSGSGTDFTFTISSLEAEDAATYYCQQYNSYPLTFGQGTKVEIK

SEQ ID NO: 37216 - protein, 11 aa, synthetic construct
  source 1..11: note = Description of Artificial Sequence: Synthetic peptide; note = BAP058-13[PD-L1] vlCDR1
KASQDVGTAVA

SEQ ID NO: 37217 - protein, 7 aa, synthetic construct
  source 1..7: note = Description of Artificial Sequence: Synthetic peptide; note = BAP058-13[PD-L1] vlCDR2
WASTRHT

SEQ ID NO: 37218 - protein, 9 aa, synthetic construct
  source 1..9: note = Description of Artificial Sequence: Synthetic peptide; note = BAP058-13[PD-L1] vlCDR3
QQYNSYPLT

SEQ ID NO: 37219 - protein, 121 aa, synthetic construct
  source 1..121: note = Description of Artificial Sequence: Synthetic polypeptide; note = H6[PD-L1] variable heavy Chain
QMQLVQSGAEVKKPGSSVKVSCKASGGTFSSYAISWVRQAPGQGLEWMGGIIPIFGTANYAQKFQGRVTITADESTSTAYMELSSLRSEDTAVYYCARGNIVATITPLDYWGQGTLVTVSS

SEQ ID NO: 37220 - protein, 5 aa, synthetic construct
  source 1..5: note = Description of Artificial Sequence: Synthetic peptide; note = H6[PD-L1] vhCDR1
SYAIS

SEQ ID NO: 37221 - protein, 17 aa, synthetic construct
  source 1..17: note = Description of Artificial Sequence: Synthetic peptide; note = H6[PD-L1] vhCDR2
GIIPIFGTANYAQKFQG

SEQ ID NO: 37222 - protein, 12 aa, synthetic construct
  source 1..12: note = Description of Artificial Sequence: Synthetic peptide; note = H6[PD-L1] vhCDR3
GNIVATITPLDY

SEQ ID NO: 37223 - protein, 108 aa, synthetic construct
  source 1..108: note = Description of Artificial Sequence: Synthetic polypeptide; note = H6[PD-L1] variable light Chain
SYELMQPPSVSVAPGKTATIACGGENIGRKTVHWYQQKPGQAPVLVIYYDSDRPSGIPERFSGSNSGNTATLTISRVEAGDEADYYCQVWDSSSDHRIFGGGTKLTVL

SEQ ID NO: 37224 - protein, 11 aa, synthetic construct
  source 1..11: note = Description of Artificial Sequence: Synthetic peptide; note = H6[PD-L1] vlCDR1
GGENIGRKTVH

SEQ ID NO: 37225 - protein, 7 aa, synthetic construct
  source 1..7: note = Description of Artificial Sequence: Synthetic peptide; note = H6[PD-L1] vlCDR2
YDSDRPS

SEQ ID NO: 37226 - protein, 11 aa, synthetic construct
  source 1..11: note = Description of Artificial Sequence: Synthetic peptide; note = H6[PD-L1] vlCDR3
QVWDSSSDHRI

SEQ ID NO: 37227 - protein, 121 aa, synthetic construct
  source 1..121: note = Description of Artificial Sequence: Synthetic polypeptide; note = RC5[PD-L1] variable heavy Chain
EVQLLESGGGVVQPGGSLRLSCAASGFTFSSYWMSWVRQAPGKGLEWVANIKQDGSEKYYVDSVKGRFTISRDNSKNTVSLQMNSLRAEDTAVYYCAKDRYYNFPLGMDVWGQGTTVTVSS

SEQ ID NO: 37228 - protein, 5 aa, synthetic construct
  source 1..5: note = Description of Artificial Sequence: Synthetic peptide; note = RC5[PD-L1] vhCDR1
SYWMS

SEQ ID NO: 37229 - protein, 17 aa, synthetic construct
  source 1..17: note = Description of Artificial Sequence: Synthetic peptide; note = RC5[PD-L1] vhCDR2
NIKQDGSEKYYVDSVKG

SEQ ID NO: 37230 - protein, 12 aa, synthetic construct
  source 1..12: note = Description of Artificial Sequence: Synthetic peptide; note = RC5[PD-L1] vhCDR3
DRYYNFPLGMDV

SEQ ID NO: 37231 - protein, 107 aa, synthetic construct
  source 1..107: note = Description of Artificial Sequence: Synthetic polypeptide; note = RC5[PD-L1] variable light Chain
AIRMTQSPSSLSASVGDRVTITCRASQSISSYLNWYQQKPGKAPKLLIYTTSSLKSGVPSRFSGSGSGTDFTLTISRLQPEDFATYYCQQSYSSTWTFGRGTKVEIK

SEQ ID NO: 37232 - protein, 11 aa, synthetic construct
  source 1..11: note = Description of Artificial Sequence: Synthetic peptide; note = RC5[PD-L1] vlCDR1
RASQSISSYLN

SEQ ID NO: 37233 - protein, 7 aa, synthetic construct
  source 1..7: note = Description of Artificial Sequence: Synthetic peptide; note = RC5[PD-L1] vlCDR2
TTSSLKS

SEQ ID NO: 37234 - protein, 9 aa, synthetic construct
  source 1..9: note = Description of Artificial Sequence: Synthetic peptide; note = RC5[PD-L1] vlCDR3
QQSYSSTWT

SEQ ID NO: 37235 - protein, 123 aa, synthetic construct
  source 1..123: note = Description of Artificial Sequence: Synthetic polypeptide; note = SH1A1Q[PD-L1] variable heavy Chain
EVQLVQSGAEVKKPGSSVKVSCKASGGTFSSYAISWVRQAPGQGLEWMGGIIPIFGTANYAQKFQGRVTITADKSTSTAYMELSSLRSEDTAVYYCAREGTIYDSSGYSFDYWGQGTLVTVSS

SEQ ID NO: 37236 - protein, 5 aa, synthetic construct
  source 1..5: note = Description of Artificial Sequence: Synthetic peptide; note = SH1A1Q[PD-L1] vhCDR1
SYAIS

SEQ ID NO: 37237 - protein, 17 aa, synthetic construct
  source 1..17: note = Description of Artificial Sequence: Synthetic peptide; note = SH1A1Q[PD-L1] vhCDR2
GIIPIFGTANYAQKFQG

SEQ ID NO: 37238 - protein, 14 aa, synthetic construct
  source 1..14: note = Description of Artificial Sequence: Synthetic peptide; note = SH1A1Q[PD-L1] vhCDR3
EGTIYDSSGYSFDY

SEQ ID NO: 37239 - protein, 110 aa, synthetic construct
  source 1..110: note = Description of Artificial Sequence: Synthetic polypeptide; note = SH1A1Q[PD-L1] variable light Chain
QSVLTQPPSVSAAPGQKVTISCSGNNSNIANNYVSWYQQLPGTAPKLLIYDNNYRPSGIPDRFSGSKSGTSATLDITGLQTGDEADYYCGVWDGSLTTGVFGGGTKLTVL

SEQ ID NO: 37240 - protein, 13 aa, synthetic construct
  source 1..13: note = Description of Artificial Sequence: Synthetic peptide; note = SH1A1Q[PD-L1] vlCDR1
SGNNSNIANNYVS

SEQ ID NO: 37241 - protein, 7 aa, synthetic construct
  source 1..7: note = Description of Artificial Sequence: Synthetic peptide; note = SH1A1Q[PD-L1] vlCDR2
DNNYRPS

SEQ ID NO: 37242 - protein, 11 aa, synthetic construct
  source 1..11: note = Description of Artificial Sequence: Synthetic peptide; note = SH1A1Q[PD-L1] vlCDR3
GVWDGSLTTGV

SEQ ID NO: 37243 - protein, 118 aa, synthetic construct
  source 1..118: note = Description of Artificial Sequence: Synthetic polypeptide; note = SH1B3[PD-L1] variable heavy Chain
QVQLVESGGGVVQPGRSLRLSCAASGFTFSSYAMHWVRQAPGKGLEWVAVISFDGSNKYYADSVRGRFTISRDNSKNTLYLQMNSLRTEDTAVYYCARGWLDRDIDYWGQGTLVTVSS

SEQ ID NO: 37244 - protein, 5 aa, synthetic construct
  source 1..5: note = Description of Artificial Sequence: Synthetic peptide; note = SH1B3[PD-L1] vhCDR1
SYAMH

SEQ ID NO: 37245 - protein, 17 aa, synthetic construct
  source 1..17: note = Description of Artificial Sequence: Synthetic peptide; note = SH1B3[PD-L1] vhCDR2
VISFDGSNKYYADSVRG

SEQ ID NO: 37246 - protein, 9 aa, synthetic construct
  source 1..9: note = Description of Artificial Sequence: Synthetic peptide; note = SH1B3[PD-L1] vhCDR3
GWLDRDIDY

SEQ ID NO: 37247 - protein, 110 aa, synthetic construct
  source 1..110: note = Description of Artificial Sequence: Synthetic polypeptide; note = SH1B3[PD-L1] variable light Chain
LPVLTQPASVSGSPGQSITISCTGTTSDIGGYDYVSWYQQHPGKAPKLMIYDVSKRPSGVSNRFSGSKSGNTASLTISGLQAEDEADYYCSSYTSSSTHVFGTGTKLTVL

SEQ ID NO: 37248 - protein, 14 aa, synthetic construct
  source 1..14: note = Description of Artificial Sequence: Synthetic peptide; note = SH1B3[PD-L1] vlCDR1
TGTTSDIGGYDYVS

SEQ ID NO: 37249 - protein, 7 aa, synthetic construct
  source 1..7: note = Description of Artificial Sequence: Synthetic peptide; note = SH1B3[PD-L1] vlCDR2
DVSKRPS

SEQ ID NO: 37250 - protein, 10 aa, synthetic construct
  source 1..10: note = Description of Artificial Sequence: Synthetic peptide; note = SH1B3[PD-L1] vlCDR3
SSYTSSSTHV

SEQ ID NO: 37251 - protein, 118 aa, synthetic construct
  source 1..118: note = Description of Artificial Sequence: Synthetic polypeptide; note = SH1D1[PD-L1] variable heavy Chain
EVQLVESGGGVVQPGRSLRLSCAASGFTFSSYAMHWVRQAPGKGLEWVAVISFDGSNKYYADSVRGRFTISRDNSKNTLYLQMNSLRTEDTAVYYCARGWLDRDIDYWGQGTLVTVSS

SEQ ID NO: 37252 - protein, 5 aa, synthetic construct
  source 1..5: note = Description of Artificial Sequence: Synthetic peptide; note = SH1D1[PD-L1] vhCDR1
SYAMH

SEQ ID NO: 37253 - protein, 17 aa, synthetic construct
  source 1..17: note = Description of Artificial Sequence: Synthetic peptide; note = SH1D1[PD-L1] vhCDR2
VISFDGSNKYYADSVRG

SEQ ID NO: 37254 - protein, 9 aa, synthetic construct
  source 1..9: note = Description of Artificial Sequence: Synthetic peptide; note = SH1D1[PD-L1] vhCDR3
GWLDRDIDY

SEQ ID NO: 37255 - protein, 111 aa, synthetic construct
  source 1..111: note = Description of Artificial Sequence: Synthetic polypeptide; note = SH1D1[PD-L1] variable light Chain
QSALTQPASVSGSPGQSITISCTGTSSDVGGYNYVSWYQQHPGKAPKLMIYDVSNRPSGVSNRFSGSKSGNTASLTISGLQAEDEADYYCSSYRSSTLGPVFGGGTKLTVL

SEQ ID NO: 37256 - protein, 14 aa, synthetic construct
  source 1..14: note = Description of Artificial Sequence: Synthetic peptide; note = SH1D1[PD-L1] vlCDR1
TGTSSDVGGYNYVS

SEQ ID NO: 37257 - protein, 7 aa, synthetic construct
  source 1..7: note = Description of Artificial Sequence: Synthetic peptide; note = SH1D1[PD-L1] vlCDR2
DVSNRPS

SEQ ID NO: 37258 - protein, 11 aa, synthetic construct
  source 1..11: note = Description of Artificial Sequence: Synthetic peptide; note = SH1D1[PD-L1] vlCDR3
SSYRSSTLGPV

SEQ ID NO: 37259 - protein, 118 aa, synthetic construct; identical to SEQ ID NO: 37243
  source 1..118: note = Description of Artificial Sequence: Synthetic polypeptide; note = SH1D2[PD-L1] variable heavy Chain

SEQ ID NO: 37260 - protein, 5 aa, synthetic construct
  source 1..5: note = Description of Artificial Sequence: Synthetic peptide; note = SH1D2[PD-L1] vhCDR1
SYAMH

SEQ ID NO: 37261 - protein, 17 aa, synthetic construct
  source 1..17: note = Description of Artificial Sequence: Synthetic peptide; note = SH1D2[PD-L1] vhCDR2
VISFDGSNKYYADSVRG

SEQ ID NO: 37262 - protein, 9 aa, synthetic construct
  source 1..9: note = Description of Artificial Sequence: Synthetic peptide; note = SH1D2[PD-L1] vhCDR3
GWLDRDIDY

SEQ ID NO: 37263 - protein, 110 aa, synthetic construct
  source 1..110: note = Description of Artificial Sequence: Synthetic polypeptide; note = SH1D2[PD-L1] variable light Chain
QAGLTQPPSVSEAPRQRVTISCSGSSSNIGNNAVNWYQQLPGKAPKLLIYYDDLLPSGVSDRFSGSKSGTSASLAISGLQSEDEADYYCAAWDDSLNGYVFGTGTKLTVL

SEQ ID NO: 37264 - protein, 13 aa, synthetic construct
  source 1..13: note = Description of Artificial Sequence: Synthetic peptide; note = SH1D2[PD-L1] vlCDR1
SGSSSNIGNNAVN

SEQ ID NO: 37265 - protein, 7 aa, synthetic construct
  source 1..7: note = Description of Artificial Sequence: Synthetic peptide; note = SH1D2[PD-L1] vlCDR2
YDDLLPS

SEQ ID NO: 37266 - protein, 11 aa, synthetic construct
  source 1..11: note = Description of Artificial Sequence: Synthetic peptide; note = SH1D2[PD-L1] vlCDR3
AAWDDSLNGYV

SEQ ID NO: 37267 - protein, 118 aa, synthetic construct; identical to SEQ ID NO: 37251
  source 1..118: note = Description of Artificial Sequence: Synthetic polypeptide; note = SH1D12[PD-L1] variable heavy Chain

SEQ ID NO: 37268 - protein, 5 aa, synthetic construct
  source 1..5: note = Description of Artificial Sequence: Synthetic peptide; note = SH1D12[PD-L1] vhCDR1
SYAMH

SEQ ID NO: 37269 - protein, 17 aa, synthetic construct
  source 1..17: note = Description of Artificial Sequence: Synthetic peptide; note = SH1D12[PD-L1] vhCDR2
VISFDGSNKYYADSVRG

SEQ ID NO: 37270 - protein, 9 aa, synthetic construct
  source 1..9: note = Description of Artificial Sequence: Synthetic peptide; note = SH1D12[PD-L1] vhCDR3
GWLDRDIDY

SEQ ID NO: 37271 - protein, 110 aa, synthetic construct
  source 1..110: note = Description of Artificial Sequence: Synthetic polypeptide; note = SH1D12[PD-L1] variable light Chain
QSALTQPRSVSGSPGQSVTISCTGTSSDVGGYNYVSWYQQHPGKAPKLMIYDVSKRPSGVPDRFSGSKSGNTASLTISGLQAEDEADYYCSSYTSSTTHVFGTGTKVTVL

SEQ ID NO: 37272 - protein, 14 aa, synthetic construct
  source 1..14: note = Description of Artificial Sequence: Synthetic peptide; note = SH1D12[PD-L1] vlCDR1
TGTSSDVGGYNYVS

SEQ ID NO: 37273 - protein, 7 aa, synthetic construct
  source 1..7: note = Description of Artificial Sequence: Synthetic peptide; note = SH1D12[PD-L1] vlCDR2
DVSKRPS

SEQ ID NO: 37274 - protein, 10 aa, synthetic construct
  source 1..10: note = Description of Artificial Sequence: Synthetic peptide; note = SH1D12[PD-L1] vlCDR3
SSYTSSTTHV

SEQ ID NO: 37275 - protein, 118 aa, synthetic construct; identical to SEQ ID NO: 37251
  source 1..118: note = Description of Artificial Sequence: Synthetic polypeptide; note = SH1E1[PD-L1] variable heavy Chain

SEQ ID NO: 37276 - protein, 5 aa, synthetic construct
  source 1..5: note = Description of Artificial Sequence: Synthetic peptide; note = SH1E1[PD-L1] vhCDR1
SYAMH

SEQ ID NO: 37277 - protein, 17 aa, synthetic construct
  source 1..17: note = Description of Artificial Sequence: Synthetic peptide; note = SH1E1[PD-L1] vhCDR2
VISFDGSNKYYADSVRG

SEQ ID NO: 37278 - protein, 9 aa, synthetic construct
  source 1..9: note = Description of Artificial Sequence: Synthetic peptide; note = SH1E1[PD-L1] vhCDR3
GWLDRDIDY

SEQ ID NO: 37279 - protein, 110 aa, synthetic construct
  source 1..110: note = Description of Artificial Sequence: Synthetic polypeptide; note = SH1E1[PD-L1] variable light Chain
QSVVTQPPSVSAAPGQKVTISCSGSSSNIGNNYVSWYQQLPGTAPKLLIYDNNKRPSGIPDRFSGSKSGTSATLGITGLQTGDEADYYCGTWDSSLSVWVFGGGTQLTVL

SEQ ID NO: 37280 - protein, 13 aa, synthetic construct
  source 1..13: note = Description of Artificial Sequence: Synthetic peptide; note = SH1E1[PD-L1] vlCDR1
SGSSSNIGNNYVS

SEQ ID NO: 37281 - protein, 7 aa, synthetic construct
  source 1..7: note = Description of Artificial Sequence: Synthetic peptide; note = SH1E1[PD-L1] vlCDR2
DNNKRPS

SEQ ID NO: 37282 - protein, 11 aa, synthetic construct
  source 1..11: note = Description of Artificial Sequence: Synthetic peptide; note = SH1E1[PD-L1] vlCDR3
GTWDSSLSVWV

SEQ ID NO: 37283 - protein, 118 aa, synthetic construct; identical to SEQ ID NO: 37243
  source 1..118: note = Description of Artificial Sequence: Synthetic polypeptide; note = SH1G9[PD-L1] variable heavy Chain

SEQ ID NO: 37284 - protein, 5 aa, synthetic construct
  source 1..5: note = Description of Artificial Sequence: Synthetic peptide; note = SH1G9[PD-L1] vhCDR1
SYAMH

SEQ ID NO: 37285 - protein, 17 aa, synthetic construct
  source 1..17: note = Description of Artificial Sequence: Synthetic peptide; note = SH1G9[PD-L1] vhCDR2
VISFDGSNKYYADSVRG

SEQ ID NO: 37286 - protein, 9 aa, synthetic construct
  source 1..9: note = Description of Artificial Sequence: Synthetic peptide; note = SH1G9[PD-L1] vhCDR3
GWLDRDIDY

SEQ ID NO: 37287 - protein, 112 aa, synthetic construct
  source 1..112: note = Description of Artificial Sequence: Synthetic polypeptide; note = SH1G9[PD-L1] variable light Chain
QSVLTQPASVSGSPGQSITISCTGTSSDVGGYNYVSWYQQHPGRAPRLMIYDVSNRPSGVSNRFSGSKSGNTASLTISGLQAEDEGDYYCSSYTSGGTLGPVFGGGTKLTVL

SEQ ID NO: 37288 - protein, 14 aa, synthetic construct
  source 1..14: note = Description of Artificial Sequence: Synthetic peptide; note = SH1G9[PD-L1] vlCDR1
TGTSSDVGGYNYVS

SEQ ID NO: 37289 - protein, 7 aa, synthetic construct
  source 1..7: note = Description of Artificial Sequence: Synthetic peptide; note = SH1G9[PD-L1] vlCDR2
DVSNRPS

SEQ ID NO: 37290 - protein, 12 aa, synthetic construct
  source 1..12: note = Description of Artificial Sequence: Synthetic peptide; note = SH1G9[PD-L1] vlCDR3
SSYTSGGTLGPV

SEQ ID NO: 37291 - protein, 120 aa, synthetic construct
  source 1..120: note = Description of Artificial Sequence: Synthetic polypeptide; note = SH1E6[PD-L1] variable heavy Chain
QVQLVQSGAEVKKPGSSVKVSCKASGGTFSRYGVHWVRQAPGQGLEWMGRLIPIVSMTNYAQKFQDRVSITTDKSTGTAYMELRSLTSEDTALYYCASVGQQLPWVFFAWGQGTLVTVSS

SEQ ID NO: 37292 - protein, 5 aa, synthetic construct
  source 1..5: note = Description of Artificial Sequence: Synthetic peptide; note = SH1E6[PD-L1] vhCDR1
RYGVH

SEQ ID NO: 37293 - protein, 17 aa, synthetic construct
  source 1..17: note = Description of Artificial Sequence: Synthetic peptide; note = SH1E6[PD-L1] vhCDR2
RLIPIVSMTNYAQKFQD

SEQ ID NO: 37294 - protein, 11 aa, synthetic construct
  source 1..11: note = Description of Artificial Sequence: Synthetic peptide; note = SH1E6[PD-L1] vhCDR3
VGQQLPWVFFA

SEQ ID NO: 37295 - protein, 110 aa, synthetic construct
  source 1..110: note = Description of Artificial Sequence: Synthetic polypeptide; note = SH1E6[PD-L1] variable light Chain
QSVVTQPPSVSAAPGQKVTISCSGSSSNIGNNYVSWYQQLPGTAPKLLIYDNNKRPSGIPDRFSGSKSGTSATLGITGLQTGDEADYYCGTWDSSLSAVVFGGGTKLTVL

SEQ ID NO: 37296 - protein, 13 aa, synthetic construct
  source 1..13: note = Description of Artificial Sequence: Synthetic peptide; note = SH1E6[PD-L1] vlCDR1
SGSSSNIGNNYVS

SEQ ID NO: 37297 - protein, 7 aa, synthetic construct
  source 1..7: note = Description of Artificial Sequence: Synthetic peptide; note = SH1E6[PD-L1] vlCDR2
DNNKRPS

SEQ ID NO: 37298 - protein, 11 aa, synthetic construct
  source 1..11: note = Description of Artificial Sequence: Synthetic peptide; note = SH1E6[PD-L1] vlCDR3
GTWDSSLSAVV

SEQ ID NO: 37299 - protein, 118 aa, synthetic construct
  source 1..118: note = Description of Artificial Sequence: Synthetic polypeptide; note = SH1A2[PD-L1] variable heavy Chain
QMQLVQSGGGVVQPGRSLRLSCAASGFTFSSYAMHWVRQAPGKGLEWVAVISFDGSNKYYADSVRGRFTISRDNSKNTLYLQMNSLRTEDTAVYYCARGWLDRDIDYWGQGTLVTVSS

SEQ ID NO: 37300 - protein, 5 aa, synthetic construct
  source 1..5: note = Description of Artificial Sequence: Synthetic peptide; note = SH1A2[PD-L1] vhCDR1
SYAMH

SEQ ID NO: 37301 - protein, 17 aa, synthetic construct
  source 1..17: note = Description of Artificial Sequence: Synthetic peptide; note = SH1A2[PD-L1] vhCDR2
VISFDGSNKYYADSVRG

SEQ ID NO: 37302 - protein, 9 aa, synthetic construct
  source 1..9: note = Description of Artificial Sequence: Synthetic peptide; note = SH1A2[PD-L1] vhCDR3
GWLDRDIDY

SEQ ID NO: 37303 - protein, 110 aa, synthetic construct
  source 1..110: note = Description of Artificial Sequence: Synthetic polypeptide; note = SH1A2[PD-L1] variable light Chain
QSVVTQPPSVSAAPGQKVTISCSGSSSNIGNNYVSWYQQVPGTAPKLLIYDNNKRPSGIPDRFSGSNSDTSATLGITGLQTGDEADYYCGTWDSSLSAWVFGGGTKLTVL

SEQ ID NO: 37304 - protein, 13 aa, synthetic construct
  source 1..13: note = Description of Artificial Sequence: Synthetic peptide; note = SH1A2[PD-L1] vlCDR1
SGSSSNIGNNYVS

SEQ ID NO: 37305 - protein, 7 aa, synthetic construct
  source 1..7: note = Description of Artificial Sequence: Synthetic peptide; note = SH1A2[PD-L1] vlCDR2
DNNKRPS

SEQ ID NO: 37306 - protein, 11 aa, synthetic construct
  source 1..11: note = Description of Artificial Sequence: Synthetic peptide; note = SH1A2[PD-L1] vlCDR3
GTWDSSLSAWV

SEQ ID NO: 37307 - protein, 118 aa, synthetic construct
  source 1..118: note = Description of Artificial Sequence: Synthetic polypeptide; note = SH1B1[PD-L1] variable heavy Chain
QVQLVQSGGGVVQPGRSLRLSCAASGFTFSSYAMHWVRQAPGKGLEWVAVISFDGSNKYYADSVRGRFTISRDNSKNTLYLQMNSLRTEDTAVYYCARGWLDRDIDYWGQGTLVTVSS

SEQ ID NO: 37308 - protein, 5 aa, synthetic construct
  source 1..5: note = Description of Artificial Sequence: Synthetic peptide; note = SH1B1[PD-L1] vhCDR1
SYAMH

SEQ ID NO: 37309 - protein, 17 aa, synthetic construct
  source 1..17: note = Description of Artificial Sequence: Synthetic peptide; note = SH1B1[PD-L1] vhCDR2
VISFDGSNKYYADSVRG

SEQ ID NO: 37310 - protein, 9 aa, synthetic construct
  source 1..9: note = Description of Artificial Sequence: Synthetic peptide; note = SH1B1[PD-L1] vhCDR3
GWLDRDIDY

SEQ ID NO: 37311 - protein, 112 aa, synthetic construct
  source 1..112: note = Description of Artificial Sequence: Synthetic polypeptide; note = SH1B1[PD-L1] variable light Chain
QSVVTQPPSVSAAPGQKVTISCSGSSSNIGNNYVSWYQQLPGTAPKLLIYDNNKRPSGIPDRFSGSKSGTSATLGITGLQTGDEADYYCGTWDSSLSAGSVVFGGGTKLTVL

SEQ ID NO: 37312 - protein, 13 aa, synthetic construct
  source 1..13: note = Description of Artificial Sequence: Synthetic peptide; note = SH1B1[PD-L1] vlCDR1
SGSSSNIGNNYVS

SEQ ID NO: 37313 - protein, 7 aa, synthetic construct
  source 1..7: note = Description of Artificial Sequence: Synthetic peptide; note = SH1B1[PD-L1] vlCDR2
DNNKRPS

SEQ ID NO: 37314 - protein, 13 aa, synthetic construct
  source 1..13: note = Description of Artificial Sequence: Synthetic peptide; note = SH1B1[PD-L1] vlCDR3
GTWDSSLSAGSVV

SEQ ID NO: 37315 - protein, 121 aa, synthetic construct
  source 1..121: note = Description of Artificial Sequence: Synthetic polypeptide; note = H6B1L[PD-L1] variable heavy Chain
QMQLVQSGAEVKKPGSSVKVSCKASGGTFSSYAYSWVRQAPGQGLEWMGGIIPSFGTANYAQKFQGRVTITADESTSTAYMELSSLRSEDTAVYYCARGPIVATITPLDYWGQGTLVTVSS

SEQ ID NO: 37316 - protein, 5 aa, synthetic construct
  source 1..5: note = Description of Artificial Sequence: Synthetic peptide; note = H6B1L[PD-L1] vhCDR1
SYAYS

SEQ ID NO: 37317 - protein, 17 aa, synthetic construct
  source 1..17: note = Description of Artificial Sequence: Synthetic peptide; note = H6B1L[PD-L1] vhCDR2
GIIPSFGTANYAQKFQG

SEQ ID NO: 37318 - protein, 12 aa, synthetic construct
  source 1..12: note = Description of Artificial Sequence: Synthetic peptide; note = H6B1L[PD-L1] vhCDR3
GPIVATITPLDY

SEQ ID NO: 37319 - protein, 108 aa, synthetic construct
  source 1..108: note = Description of Artificial Sequence: Synthetic polypeptide; note = H6B1L[PD-L1] variable light Chain
SYELMQPPSVSVAPGKTATIACGGENIGRKTVHWYQQKPGQAPVLVIYYDSDRPSGIPERFSGSNSGNTATLTISRVEAGDEADYYCLVWDSSSDHRIFGGGTKLTVL

SEQ ID NO: 37320 - protein, 11 aa, synthetic construct
  source 1..11: note = Description of Artificial Sequence: Synthetic peptide; note = H6B1L[PD-L1] vlCDR1
GGENIGRKTVH

SEQ ID NO: 37321 - protein, 7 aa, synthetic construct
  source 1..7: note = Description of Artificial Sequence: Synthetic peptide; note = H6B1L[PD-L1] vlCDR2
YDSDRPS

SEQ ID NO: 37322 - protein, 11 aa, synthetic construct
  source 1..11: note = Description of Artificial Sequence: Synthetic peptide; note = H6B1L[PD-L1] vlCDR3
LVWDSSSDHRI

SEQ ID NO: 37323 - protein, 121 aa, synthetic construct
  source 1..121: note = Description of Artificial Sequence: Synthetic polypeptide; note = H6A1[PD-L1] variable heavy Chain
QMQLVQSGAEVKKPGSSVKVSCKASGGTFSSYAYSWVRQAPGQGLEWMGGIIPIFGTANYAQKFQGRVTITADESTSTAYMELSSLRSEDTAVYYCARGPIVATITPLDYWGQGTLVTVSS

SEQ ID NO: 37324 - protein, 5 aa, synthetic construct
  source 1..5: note = Description of Artificial Sequence: Synthetic peptide; note = H6A1[PD-L1] vhCDR1
SYAYS

SEQ ID NO: 37325 - protein, 17 aa, synthetic construct
  source 1..17: note = Description of Artificial Sequence: Synthetic peptide; note = H6A1[PD-L1] vhCDR2
GIIPIFGTANYAQKFQG

SEQ ID NO: 37326 - protein, 12 aa, synthetic construct
  source 1..12: note = Description of Artificial Sequence: Synthetic peptide; note = H6A1[PD-L1] vhCDR3
GPIVATITPLDY

SEQ ID NO: 37327 - protein, 108 aa, synthetic construct; identical to SEQ ID NO: 37223
  source 1..108: note = Description of Artificial Sequence: Synthetic polypeptide; note = H6A1[PD-L1] variable light Chain

SEQ ID NO: 37328 - protein, 11 aa, synthetic construct
  source 1..11: note = Description of Artificial Sequence: Synthetic peptide; note = H6A1[PD-L1] vlCDR1
GGENIGRKTVH

SEQ ID NO: 37329 - protein, 7 aa, synthetic construct
  source 1..7: note = Description of Artificial Sequence: Synthetic peptide; note = H6A1[PD-L1] vlCDR2
YDSDRPS

SEQ ID NO: 37330 - protein, 11 aa, synthetic construct
  source 1..11: note = Description of Artificial Sequence: Synthetic peptide; note = H6A1[PD-L1] vlCDR3
QVWDSSSDHRI

SEQ ID NO: 37331 - protein, 121 aa, synthetic construct; identical to SEQ ID NO: 37315
  source 1..121: note = Description of Artificial Sequence: Synthetic polypeptide; note = H6B1[PD-L1] variable heavy Chain

SEQ ID NO: 37332 - protein, 5 aa, synthetic construct
  source 1..5: note = Description of Artificial Sequence: Synthetic peptide; note = H6B1[PD-L1] vhCDR1
SYAYS

SEQ ID NO: 37333 - protein, 17 aa, synthetic construct
  source 1..17: note = Description of Artificial Sequence: Synthetic peptide; note = H6B1[PD-L1] vhCDR2
GIIPSFGTANYAQKFQG

SEQ ID NO: 37334 - protein, 12 aa, synthetic construct
  source 1..12: note = Description of Artificial Sequence: Synthetic peptide; note = H6B1[PD-L1] vhCDR3
GPIVATITPLDY

SEQ ID NO: 37335 - protein, 108 aa, synthetic construct; identical to SEQ ID NO: 37223
  source 1..108: note = Description of Artificial Sequence: Synthetic polypeptide; note = H6B1[PD-L1] variable light Chain

SEQ ID NO: 37336 - protein, 11 aa, synthetic construct
  source 1..11: note = Description of Artificial Sequence: Synthetic peptide; note = H6B1[PD-L1] vlCDR1
GGENIGRKTVH

SEQ ID NO: 37337 - protein, 7 aa, synthetic construct
  source 1..7: note = Description of Artificial Sequence: Synthetic peptide; note = H6B1[PD-L1] vlCDR2
YDSDRPS

SEQ ID NO: 37338 - protein, 11 aa, synthetic construct
  source 1..11: note = Description of Artificial Sequence: Synthetic peptide; note = H6B1[PD-L1] vlCDR3
QVWDSSSDHRI

SEQ ID NO: 37339 - protein, 121 aa, synthetic construct
  source 1..121: note = Description of Artificial Sequence: Synthetic polypeptide; note = H6B2[PD-L1] variable heavy Chain
QMQLVQSGAEVKKPGSSVKVSCKASGGTFSSYAISWVRQAPGQGLEWMGGIIPAFGTANYAQKFQGRVTITADESTSTAYMELSSLRSEDTAVYYCARGPIVATITPLDYWGQGTLVTVSS

SEQ ID NO: 37340 - protein, 5 aa, synthetic construct
  source 1..5: note = Description of Artificial Sequence: Synthetic peptide; note = H6B2[PD-L1] vhCDR1
SYAIS

SEQ ID NO: 37341 - protein, 17 aa, synthetic construct
  source 1..17: note = Description of Artificial Sequence: Synthetic peptide; note = H6B2[PD-L1] vhCDR2
GIIPAFGTANYAQKFQG

SEQ ID NO: 37342 - protein, 12 aa, synthetic construct
  source 1..12: note = Description of Artificial Sequence: Synthetic peptide; note = H6B2[PD-L1] vhCDR3
GPIVATITPLDY

SEQ ID NO: 37343 - protein, 108 aa, synthetic construct; identical to SEQ ID NO: 37223
  source 1..108: note = Description of Artificial Sequence: Synthetic polypeptide; note = H6B2[PD-L1] variable light Chain

SEQ ID NO: 37344 - protein, 11 aa, synthetic construct
  source 1..11: note = Description of Artificial Sequence: Synthetic peptide; note = H6B2[PD-L1] vlCDR1
GGENIGRKTVH

SEQ ID NO: 37345 - protein, 7 aa, synthetic construct
  source 1..7: note = Description of Artificial Sequence: Synthetic peptide; note = H6B2[PD-L1] vlCDR2
YDSDRPS

SEQ ID NO: 37346 - protein, 11 aa, synthetic construct
  source 1..11: note = Description of Artificial Sequence: Synthetic peptide; note = H6B2[PD-L1] vlCDR3
QVWDSSSDHRI

SEQ ID NO: 37347 - protein, 118 aa, synthetic construct
  source 1..118: note = Description of Artificial Sequence: Synthetic polypeptide; note = G12[PD-L1] variable heavy Chain
EVQLVQSGAEVKKPGASVKVSCKASGYTFTGYYMHWVRQAPGQGLEWMGWINPNSDNTGSAQKFQGRVFMTKTTSLNTAYMELSGLRSEDTAIYYCARERSSGYFDFWGQGTLVTVSS

SEQ ID NO: 37348 - protein, 5 aa, synthetic construct
  source 1..5: note = Description of Artificial Sequence: Synthetic peptide; note = G12[PD-L1] vhCDR1
GYYMH

SEQ ID NO: 37349 - protein, 17 aa, synthetic construct
  source 1..17: note = Description of Artificial Sequence: Synthetic peptide; note = G12[PD-L1] vhCDR2
WINPNSDNTGSAQKFQG

SEQ ID NO: 37350 - protein, 9 aa, synthetic construct
  source 1..9: note = Description of Artificial Sequence: Synthetic peptide; note = G12[PD-L1] vhCDR3
ERSSGYFDF

SEQ ID NO: 37351 - protein, 107 aa, synthetic construct
  source 1..107: note = Description of Artificial Sequence: Synthetic polypeptide; note = G12[PD-L1] variable light Chain
DIVMTQSPSSLSASVGDRVTITCRASQSISSYLNWYQQKPGKAPKLLIYAASSLQSGVPSRFSGSGSGTDFTLTISSLQPEDFATYYCQQSYSTPITFGQGTRLEIK

SEQ ID NO: 37352 - protein, 11 aa, synthetic construct
  source 1..11: note = Description of Artificial Sequence: Synthetic peptide; note = G12[PD-L1] vlCDR1
RASQSISSYLN

SEQ ID NO: 37353 - protein, 7 aa, synthetic construct
  source 1..7: note = Description of Artificial Sequence: Synthetic peptide; note = G12[PD-L1] vlCDR2
AASSLQS

SEQ ID NO: 37354 - protein, 9 aa, synthetic construct
  source 1..9: note = Description of Artificial Sequence: Synthetic peptide; note = G12[PD-L1] vlCDR3
QQSYSTPIT

SEQ ID NO: 37355 - protein, 118 aa, synthetic construct
  source 1..118: note = Description of Artificial Sequence: Synthetic polypeptide; note = RSA1[PD-L1] variable heavy Chain
EVQLVQSGGGLVQPGGSLRLSCAASGFTFSSYSMNWVRQAPGKGLEWVSYISSSSSTIYYADSVKGRFTISRDNAKNSLYLQMNSLRDEDTAVYYCARGDYYYGMDVWGQGTTVTVSS

SEQ ID NO: 37356 - protein, 5 aa, synthetic construct
  source 1..5: note = Description of Artificial Sequence: Synthetic peptide; note = RSA1[PD-L1] vhCDR1
SYSMN

SEQ ID NO: 37357 - protein, 17 aa, synthetic construct
  source 1..17: note = Description of Artificial Sequence: Synthetic peptide; note = RSA1[PD-L1] vhCDR2
YISSSSSTIYYADSVKG

SEQ ID NO: 37358 - protein, 9 aa, synthetic construct
  source 1..9: note = Description of Artificial Sequence: Synthetic peptide; note = RSA1[PD-L1] vhCDR3
GDYYYGMDV

SEQ ID NO: 37359 - protein, 108 aa, synthetic construct
  source 1..108: note = Description of Artificial Sequence: Synthetic polypeptide; note = RSA1[PD-L1] variable light Chain
NIQMTQSPSSVSASVGDRVTITCRASQDISRWLAWYQQKPGKAPKLLIYAASSLQSGVPSRFSGSGSGTDFALTISSLQPEDFATYYCQQADSFFSITFGQGTRLEIK

SEQ ID NO: 37360 - protein, 11 aa, synthetic construct
  source 1..11: note = Description of Artificial Sequence: Synthetic peptide; note = RSA1[PD-L1] vlCDR1
RASQDISRWLA

SEQ ID NO: 37361 - protein, 7 aa, synthetic construct
  source 1..7: note = Description of Artificial Sequence: Synthetic peptide; note = RSA1[PD-L1] vlCDR2
AASSLQS

SEQ ID NO: 37362 - protein, 10 aa, synthetic construct
  source 1..10: note = Description of Artificial Sequence: Synthetic peptide; note = RSA1[PD-L1] vlCDR3
QQADSFFSIT

SEQ ID NO: 37363 - protein, 120 aa, synthetic construct
  source 1..120: note = Description of Artificial Sequence: Synthetic polypeptide; note = RA3[PD-L1] variable heavy Chain
QMQLVQSGAEVKKPGSSVKVSCKASGGTFSRYGVHWVRQAPGQGLEWMGRLIPIVSMTNYAQKFQDRVSITTDKSTGTAYMELRSLTSEDTALYYCASVGQQLPWVFFAWGQGTLVTVSS

SEQ ID NO: 37364 - protein, 5 aa, synthetic construct
  source 1..5: note = Description of Artificial Sequence: Synthetic peptide; note = RA3[PD-L1] vhCDR1
RYGVH

SEQ ID NO: 37365 - protein, 17 aa, synthetic construct
  source 1..17: note = Description of Artificial Sequence: Synthetic peptide; note = RA3[PD-L1] vhCDR2
RLIPIVSMTNYAQKFQD

SEQ ID NO: 37366 - protein, 11 aa, synthetic construct
  source 1..11: note = Description of Artificial Sequence: Synthetic peptide; note = RA3[PD-L1] vhCDR3
VGQQLPWVFFA

SEQ ID NO: 37367 - protein, 107 aa, synthetic construct
  source 1..107: note = Description of Artificial Sequence: Synthetic polypeptide; note = RA3[PD-L1] variable light Chain
DIQMTQSPSSLSASVGDRVTITCQASQDISNYLNWYQQKPGKAPKLLIYDASTLQSGVPSRFSGSGSGTDFTLTISSLQPEDFATYYCQQSYSSHWTFGQGTKVEIK

SEQ ID NO: 37368 - protein, 11 aa, synthetic construct
  source 1..11: note = Description of Artificial Sequence: Synthetic peptide; note = RA3[PD-L1] vlCDR1
QASQDISNYLN

SEQ ID NO: 37369 - protein, 7 aa, synthetic construct
  source 1..7: note = Description of Artificial Sequence: Synthetic peptide; note = RA3[PD-L1] vlCDR2
DASTLQS

SEQ ID NO: 37370 - protein, 9 aa, synthetic construct
  source 1..9: note = Description of Artificial Sequence: Synthetic peptide; note = RA3[PD-L1] vlCDR3
QQSYSSHWT

SEQ ID NO: 37371 - protein, 119 aa, synthetic construct
  source 1..119: note = Description of Artificial Sequence: Synthetic polypeptide; note = SH1E2[PD-L1] variable heavy Chain
EVQLVESGAEVKKPGSSVKVSCKASGGTFSSYAISWVRQAPGQGLEWMGGIIPIFGTANYAQKFQGRVTITADESTSTAYMELSSLRSEDTAVYYCARAPYYYYYMDVWGQGTTVTVSS

SEQ ID NO: 37372 - protein, 5 aa, synthetic construct
  source 1..5: note = Description of Artificial Sequence: Synthetic peptide; note = SH1E2[PD-L1] vhCDR1
SYAIS

SEQ ID NO: 37373 - protein, 17 aa, synthetic construct
  source 1..17: note = Description of Artificial Sequence: Synthetic peptide; note = SH1E2[PD-L1] vhCDR2
GIIPIFGTANYAQKFQG

SEQ ID NO: 37374 - protein, 10 aa, synthetic construct
  source 1..10: note = Description of Artificial Sequence: Synthetic peptide; note = SH1E2[PD-L1] vhCDR3
APYYYYYMDV

SEQ ID NO: 37375 - protein, 109 aa, synthetic construct
  source 1..109: note = Description of Artificial Sequence: Synthetic polypeptide; note = SH1E2[PD-L1] variable light Chain
QSALTQPASVSGSLGQSVTISCTGSSSDVGSYNLVSWYQQHPGKAPNLMIYDVSKRSGVSNRFSGSKSGNTASLTISGLQAEDEADYYCSSYTGISTVVFGGGTKLTVL

SEQ ID NO: 37376 - protein, 14 aa, synthetic construct
  source 1..14: note = Description of Artificial Sequence: Synthetic peptide; note = SH1E2[PD-L1] vlCDR1
TGSSSDVGSYNLVS

SEQ ID NO: 37377 - protein, 6 aa, synthetic construct
  source 1..6: note = Description of Artificial Sequence: Synthetic peptide; note = SH1E2[PD-L1] vlCDR2
DVSKRS

SEQ ID NO: 37378 - protein, 10 aa, synthetic construct
  source 1..10: note = Description of Artificial Sequence: Synthetic peptide; note = SH1E2[PD-L1] vlCDR3
SSYTGISTVV

SEQ ID NO: 37379 - protein, 120 aa, synthetic construct; identical to SEQ ID NO: 37291
  source 1..120: note = Description of Artificial Sequence: Synthetic polypeptide; note = SH1E4[PD-L1] variable heavy Chain

SEQ ID NO: 37380 - protein, 5 aa, synthetic construct
  source 1..5: note = Description of Artificial Sequence: Synthetic peptide; note = SH1E4[PD-L1] vhCDR1
RYGVH

SEQ ID NO: 37381 - protein, 17 aa, synthetic construct
  source 1..17: note = Description of Artificial Sequence: Synthetic peptide; note = SH1E4[PD-L1] vhCDR2
RLIPIVSMTNYAQKFQD

SEQ ID NO: 37382 - protein, 11 aa, synthetic construct
  source 1..11: note = Description of Artificial Sequence: Synthetic peptide; note = SH1E4[PD-L1] vhCDR3
VGQQLPWVFFA

SEQ ID NO: 37383 - protein, 112 aa, synthetic construct
  source 1..112: note = Description of Artificial Sequence: Synthetic polypeptide; note = SH1E4[PD-L1] variable light Chain
QSVLTQPPSASGSPGQSVTISCTGTSSDIGGYDSVSWYQQHPGKAPKLMIYDVSKRPSGVSNRFSGSKSGNTASLTISGLQAEDEADYYCSSYTSSSIFFYVFGTGTKVTVL

SEQ ID NO: 37384 - protein, 14 aa, synthetic construct
  source 1..14: note = Description of Artificial Sequence: Synthetic peptide; note = SH1E4[PD-L1] vlCDR1
TGTSSDIGGYDSVS

SEQ ID NO: 37385 - protein, 7 aa, synthetic construct
  source 1..7: note = Description of Artificial Sequence: Synthetic peptide; note = SH1E4[PD-L1] vlCDR2
DVSKRPS

SEQ ID NO: 37386 - protein, 12 aa, synthetic construct
  source 1..12: note = Description of Artificial Sequence: Synthetic peptide; note = SH1E4[PD-L1] vlCDR3
SSYTSSSIFFYV

SEQ ID NO: 37387 - protein, 121 aa, synthetic construct
  source 1..121: note = Description of Artificial Sequence: Synthetic polypeptide; note = SH1B11[PD-L1] variable heavy Chain
QVQLVQSGSELKKPGSSVKVSCKASGYSFSGYYIHWVRQAPGQGLEWMGWIDPNSGVTNYVRRFQGRVTMTRDTSLSTAYMELSGLTADDTAVYYCARDENLWQFGYLDYWGQGTLVTVSS

SEQ ID NO: 37388 - protein, 5 aa, synthetic construct
  source 1..5: note = Description of Artificial Sequence: Synthetic peptide; note = SH1B11[PD-L1] vhCDR1
GYYIH

SEQ ID NO: 37389 - protein, 17 aa, synthetic construct
  source 1..17: note = Description of Artificial Sequence: Synthetic peptide; note = SH1B11[PD-L1] vhCDR2
WIDPNSGVTNYVRRFQG

SEQ ID NO: 37390 - protein, 12 aa, synthetic construct
  source 1..12: note = Description of Artificial Sequence: Synthetic peptide; note = SH1B11[PD-L1] vhCDR3
DENLWQFGYLDY

SEQ ID NO: 37391 - protein, 107 aa, synthetic construct
  source 1..107: note = Description of Artificial Sequence: Synthetic polypeptide; note = SH1B11[PD-L1] variable light Chain
DIVMTQSPSSLSASIGDRVTITCRASQRISAYVNWYQQKPGKAPKVLIYAASSLRSGVPSRFSGSGSGTDFTLTISSLQPEDFATYYCQQTYSSPWTFGQGTKVEIK

SEQ ID NO: 37392 - protein, 11 aa, synthetic construct
  source 1..11: note = Description of Artificial Sequence: Synthetic peptide; note = SH1B11[PD-L1] vlCDR1
RASQRISAYVN

SEQ ID NO: 37393 - protein, 7 aa, synthetic construct
  source 1..7: note = Description of Artificial Sequence: Synthetic peptide; note = SH1B11[PD-L1] vlCDR2
AASSLRS

SEQ ID NO: 37394 - protein, 9 aa, synthetic construct
  source 1..9: note = Description of Artificial Sequence: Synthetic peptide; note = SH1B11[PD-L1] vlCDR3
QQTYSSPWT

SEQ ID NO: 37395 - protein, 119 aa, synthetic construct
  source 1..119: note = Description of Artificial Sequence: Synthetic polypeptide; note = SH1C8[PD-L1] variable heavy Chain
EVQLVESGGGVVQPGRSLRLSCAASGFTFSSYAMHWVRQAPGKGLEWVAVISYDGSNKYYADSVKGRFTISRDNSKNTLYLQMNSLRAEDTAVYYCARGQWLVTELDYWGQGTLVTVSS

SEQ ID NO: 37396 - protein, 5 aa, synthetic construct
  source 1..5: note = Description of Artificial Sequence: Synthetic peptide; note = SH1C8[PD-L1] vhCDR1
SYAMH

SEQ ID NO: 37397 - protein, 17 aa, synthetic construct
  source 1..17: note = Description of Artificial Sequence: Synthetic peptide; note = SH1C8[PD-L1] vhCDR2
VISYDGSNKYYADSVKG

SEQ ID NO: 37398 - protein, 10 aa, synthetic construct
  source 1..10: note = Description of Artificial Sequence: Synthetic peptide; note = SH1C8[PD-L1] vhCDR3
GQWLVTELDY

SEQ ID NO: 37399 - protein, 111 aa, synthetic construct
  source 1..111: note = Description of Artificial Sequence: Synthetic polypeptide; note = SH1C8[PD-L1] variable light Chain
QSVVTQPPSVSAAPGQKVTISCSGSSSDIGNHYVSWYQQLPGTAPKLLIYDNNQRPSGIPDRFSGSKSGTSATLAITGLQTGDEADYYCGTWDNSLSPHLLFGGGTKLTVL

SEQ ID NO: 37400 - protein, 13 aa, synthetic construct
  source 1..13: note = Description of Artificial Sequence: Synthetic peptide; note = SH1C8[PD-L1] vlCDR1
SGSSSDIGNHYVS

SEQ ID NO: 37401 - protein, 7 aa, synthetic construct
  source 1..7: note = Description of Artificial Sequence: Synthetic peptide; note = SH1C8[PD-L1] vlCDR2
DNNQRPS

SEQ ID NO: 37402 - protein, 12 aa, synthetic construct
  source 1..12: note = Description of Artificial Sequence: Synthetic peptide; note = SH1C8[PD-L1] vlCDR3
GTWDNSLSPHLL

SEQ ID NO: 37403 - protein, 123 aa, synthetic construct
  source 1..123: note = Description of Artificial Sequence: Synthetic polypeptide; note = H1H9364P2[PD-L1] variable heavy Chain
EVQLVESGGGLVQPGRSLRLSCAASGFTFDDYALHWVRQAPGKGLEWVSGISWTGGTIDYADSVKGRFTISRDNAKNSLYLQMSSLRTEDTAIYYCTRDIRGNWKYGGWFDPWGQGTLVTVSS

SEQ ID NO: 37404 - protein, 5 aa, synthetic construct
  source 1..5: note = Description of Artificial Sequence: Synthetic peptide; note = H1H9364P2[PD-L1] vhCDR1
DYALH

SEQ ID NO: 37405 - protein, 17 aa, synthetic construct
  source 1..17: note = Description of Artificial Sequence: Synthetic peptide; note = H1H9364P2[PD-L1] vhCDR2
GISWTGGTIDYADSVKG

SEQ ID NO: 37406 - protein, 14 aa, synthetic construct
  source 1..14: note = Description of Artificial Sequence: Synthetic peptide; note = H1H9364P2[PD-L1] vhCDR3
DIRGNWKYGGWFDP

SEQ ID NO: 37407 - protein, 108 aa, synthetic construct; identical to SEQ ID NO: 11711
  source 1..108: note = Description of Artificial Sequence: Synthetic polypeptide; note = H1H9364P2[PD-L1] variable light Chain

SEQ ID NO: 37408 - protein, 11 aa, synthetic construct
  source 1..11: note = Description of Artificial Sequence: Synthetic peptide; note = H1H9364P2[PD-L1] vlCDR1
RASQSISSYLN

SEQ ID NO: 37409 - protein, 7 aa, synthetic construct
  source 1..7: note = Description of Artificial Sequence: Synthetic peptide; note = H1H9364P2[PD-L1] vlCDR2
AASSLQS

SEQ ID NO: 37410 - protein, 10 aa, synthetic construct
  source 1..10: note = Description of Artificial Sequence: Synthetic peptide; note = H1H9364P2[PD-L1] vlCDR3
QQSYSTPPIT

SEQ ID NO: 37411 - protein, 120 aa, synthetic construct
  source 1..120: note = Description of Artificial Sequence: Synthetic polypeptide; note = H1H9373P2[PD-L1] variable heavy Chain
QVQLVQSGTEVKKPGASVKVSCKASGYTFTAYYMHWVRQAPGQGLDWMGWISPNSGFTNYAQKFQGRVTMTRDTSINTFYMELSGLRSDDTAVYYCAREGSTHHNSFDPWGQGTLVTVSS

SEQ ID NO: 37412 - protein, 5 aa, synthetic construct
  source 1..5: note = Description of Artificial Sequence: Synthetic peptide; note = H1H9373P2[PD-L1] vhCDR1
AYYMH

SEQ ID NO: 37413 - protein, 17 aa, synthetic construct
  source 1..17: note = Description of Artificial Sequence: Synthetic peptide; note = H1H9373P2[PD-L1] vhCDR2
WISPNSGFTNYAQKFQG

SEQ ID NO: 37414 - protein, 11 aa, synthetic construct
  source 1..11: note = Description of Artificial Sequence: Synthetic peptide; note = H1H9373P2[PD-L1] vhCDR3
EGSTHHNSFDP

SEQ ID NO: 37415 - protein, 108 aa, synthetic construct; identical to SEQ ID NO: 11711
  source 1..108: note = Description of Artificial Sequence: Synthetic polypeptide; note = H1H9373P2[PD-L1] variable light Chain

SEQ ID NO: 37416 - protein, 11 aa, synthetic construct
  source 1..11: note = Description of Artificial Sequence: Synthetic peptide; note = H1H9373P2[PD-L1] vlCDR1
RASQSISSYLN

SEQ ID NO: 37417 - protein, 7 aa, synthetic construct
  source 1..7: note = Description of Artificial Sequence: Synthetic peptide; note = H1H9373P2[PD-L1] vlCDR2
AASSLQS

SEQ ID NO: 37418 - protein, 10 aa, synthetic construct
  source 1..10: note = Description of Artificial Sequence: Synthetic peptide; note = H1H9373P2[PD-L1] vlCDR3
QQSYSTPPIT

SEQ ID NO: 37419 - protein, 120 aa, synthetic construct
  source 1..120: note = Description of Artificial Sequence: Synthetic polypeptide; note = H1H8314N[PD-L1] variable heavy Chain
EVQLVESGGGVVRPGGSLRLSCAASGFTFDDYGMTWVRQAPGRGLEWVSGIHWHGKRTGYADSVKGRFTISRDNAKKSLYLQMNSLKGEDTALYHCVRGGMSTGDWFDPWGQGTLVIVSS

SEQ ID NO: 37420 - protein, 5 aa, synthetic construct
  source 1..5: note = Description of Artificial Sequence: Synthetic peptide; note = H1H8314N[PD-L1] vhCDR1
DYGMT

SEQ ID NO: 37421 - protein, 17 aa, synthetic construct
  source 1..17: note = Description of Artificial Sequence: Synthetic peptide; note = H1H8314N[PD-L1] vhCDR2
GIHWHGKRTGYADSVKG

SEQ ID NO: 37422 - protein, 11 aa, synthetic construct
  source 1..11: note = Description of Artificial Sequence: Synthetic peptide; note = H1H8314N[PD-L1] vhCDR3
GGMSTGDWFDP

SEQ ID NO: 37423 - protein, 108 aa, synthetic construct
  source 1..108: note = Description of Artificial Sequence: Synthetic polypeptide; note = H1H8314N[PD-L1] variable light Chain
DIQMTQSPSSLSASLGDRVTITCRASQSINSYLNWYQQKPGKAPKLLIYVASSLQSGVPSRFSGSGSGTEFTLTISNLQPEDFATYYCQQSYSTPPITFGQGTRLEIK

SEQ ID NO: 37424 - protein, 11 aa, synthetic construct
  source 1..11: note = Description of Artificial Sequence: Synthetic peptide; note = H1H8314N[PD-L1] vlCDR1
RASQSINSYLN

SEQ ID NO: 37425 - protein, 7 aa, synthetic construct
  source 1..7: note = Description of Artificial Sequence: Synthetic peptide; note = H1H8314N[PD-L1] vlCDR2
VASSLQS

SEQ ID NO: 37426 - protein, 10 aa, synthetic construct
  source 1..10: note = Description of Artificial Sequence: Synthetic peptide; note = H1H8314N[PD-L1] vlCDR3
QQSYSTPPIT

SEQ ID NO: 37427 - protein, 119 aa, synthetic construct
  source 1..119: note = Description of Artificial Sequence: Synthetic polypeptide; note = PDL1.3.1[PD-L1] variable heavy Chain
EVQLQQSGTELVKPGASVKLSCTTSGFNIQDTYMHWVKQRPEQGLEWIGWIDPANGNTKYDPKFQGKATIIADTSSNTAYLQLRGLTSEDTAVYYCARSGVSTAHFDYWGQGTTLTVSS

SEQ ID NO: 37428 - protein, 5 aa, synthetic construct
  source 1..5: note = Description of Artificial Sequence: Synthetic peptide; note = PDL1.3.1[PD-L1] vhCDR1
DTYMH

SEQ ID NO: 37429 - protein, 17 aa, synthetic construct
  source 1..17: note = Description of Artificial Sequence: Synthetic peptide; note = PDL1.3.1[PD-L1] vhCDR2
WIDPANGNTKYDPKFQG

SEQ ID NO: 37430 - protein, 10 aa, synthetic construct
  source 1..10: note = Description of Artificial Sequence: Synthetic peptide; note = PDL1.3.1[PD-L1] vhCDR3
SGVSTAHFDY

SEQ ID NO: 37431 - protein, 106 aa, synthetic construct
  source 1..106: note = Description of Artificial Sequence: Synthetic polypeptide; note = PDL1.3.1[PD-L1] variable light Chain
QIVLSQSPAILSASPGEKVTMTCRASSSVSFMHWYQQKPGSSPKPWIYATSNLASGVPTRFSGSGSGTSYSLTLSRVEAEDAATYYCQQWSSYPRTFGGGTKLEIK

SEQ ID NO: 37432 - protein, 10 aa, synthetic construct
  source 1..10: note = Description of Artificial Sequence: Synthetic peptide; note = PDL1.3.1[PD-L1] vlCDR1
RASSSVSFMH

SEQ ID NO: 37433 - protein, 7 aa, synthetic construct
  source 1..7: note = Description of Artificial Sequence: Synthetic peptide; note = PDL1.3.1[PD-L1] vlCDR2
ATSNLAS

SEQ ID NO: 37434 - protein, 9 aa, synthetic construct
  source 1..9: note = Description of Artificial Sequence: Synthetic peptide; note = PDL1.3.1[PD-L1] vlCDR3
QQWSSYPRT

SEQ ID NO: 37435 - protein, 119 aa, synthetic construct; identical to SEQ ID NO: 21505
  source 1..119: note = Description of Artificial Sequence: Synthetic polypeptide; note = 10A7[TIGIT] variable heavy Chain

SEQ ID NO: 37436 - protein, 5 aa, synthetic construct
  source 1..5: note = Description of Artificial Sequence: Synthetic peptide; note = 10A7[TIGIT] vhCDR1
SFTMH

SEQ ID NO: 37437 - protein, 17 aa, synthetic construct
  source 1..17: note = Description of Artificial Sequence: Synthetic peptide; note = 10A7[TIGIT] vhCDR2
FIRSGSGIVFYADAVRG

SEQ ID NO: 37438 - protein, 10 aa, synthetic construct
  source 1..10: note = Description of Artificial Sequence: Synthetic peptide; note = 10A7[TIGIT] vhCDR3
RPLGHNTFDS

SEQ ID NO: 37439 - protein, 113 aa, synthetic construct; identical to SEQ ID NO: 21510
  source 1..113: note = Description of Artificial Sequence: Synthetic polypeptide; note = 10A7[TIGIT] variable light Chain

SEQ ID NO: 37440 - protein, 17 aa, synthetic construct
  source 1..17: note = Description of Artificial Sequence: Synthetic peptide; note = 10A7[TIGIT] vlCDR1
KSSQSLYYSGVKENLLA

SEQ ID NO: 37441 - protein, 7 aa, synthetic construct
  source 1..7: note = Description of Artificial Sequence: Synthetic peptide; note = 10A7[TIGIT] vlCDR2
YASIRFT

SEQ ID NO: 37442 - protein, 9 aa, synthetic construct
  source 1..9: note = Description of Artificial Sequence: Synthetic peptide; note = 10A7[TIGIT] vlCDR3
QQGINNPLT

SEQ ID NO: 37443 - protein, 119 aa, synthetic construct; identical to SEQ ID NO: 21515
  source 1..119: note = Description of Artificial Sequence: Synthetic polypeptide; note = 1F4[TIGIT] variable heavy Chain

SEQ ID NO: 37444 - protein, 5 aa, synthetic construct
  source 1..5: note = Description of Artificial Sequence: Synthetic peptide; note = 1F4[TIGIT] vhCDR1
GHLMN

SEQ ID NO: 37445 - protein, 17 aa, synthetic construct
  source 1..17: note = Description of Artificial Sequence: Synthetic peptide; note = 1F4[TIGIT] vhCDR2
LIIPYNGGTSYNQKFKG

SEQ ID NO: 37446 - protein, 10 aa, synthetic construct
  source 1..10: note = Description of Artificial Sequence: Synthetic peptide; note = 1F4[TIGIT] vhCDR3
GLRGFYAMDY

SEQ ID NO: 37447 - protein, 112 aa, synthetic construct; identical to SEQ ID NO: 21520
  source 1..112: note = Description of Artificial Sequence: Synthetic polypeptide; note = 1F4[TIGIT] variable light Chain

SEQ ID NO: 37448 - protein, 16 aa, synthetic construct
  source 1..16: note = Description of Artificial Sequence: Synthetic peptide; note = 1F4[TIGIT] vlCDR1
RSSQSLVNSYGNTFLS

SEQ ID NO: 37449 - protein, 7 aa, synthetic construct
  source 1..7: note = Description of Artificial Sequence: Synthetic peptide; note = 1F4[TIGIT] vlCDR2
GISNRFS

SEQ ID NO: 37450 - protein, 9 aa, synthetic construct
  source 1..9: note = Description of Artificial Sequence: Synthetic peptide; note = 1F4[TIGIT] vlCDR3
LQGTHQPPT

SEQ ID NO: 37451 - protein, 126 aa, synthetic construct
  source 1..126: note = Description of Artificial Sequence: Synthetic polypeptide; note = 4.1D3[TIGIT] variable heavy Chain
QVQLQQSGPGLVKPSQTLSLTCAISGDSVSSNSAAWNWIRQSPSRGLEWLGKTYYRFKWYSDYAVSVKGRITINPDTSKNQFSLQLNSVTPEDTAVFYCTRESTTYDLLAGPFDYWGQGTLVTVSS

SEQ ID NO: 37452 - protein, 7 aa, synthetic construct
  source 1..7: note = Description of Artificial Sequence: Synthetic peptide; note = 4.1D3[TIGIT] vhCDR1
SNSAAWN

SEQ ID NO: 37453 - protein, 18 aa, synthetic construct
  source 1..18: note = Description of Artificial Sequence: Synthetic peptide; note = 4.1D3[TIGIT] vhCDR2
KTYYRFKWYSDYAVSVKG

SEQ ID NO: 37454 - protein, 14 aa, synthetic construct
  source 1..14: note = Description of Artificial Sequence: Synthetic peptide; note = 4.1D3[TIGIT] vhCDR3
ESTTYDLLAGPFDY

SEQ ID NO: 37455 - protein, 113 aa, synthetic construct
  source 1..113: note = Description of Artificial Sequence: Synthetic polypeptide; note = 4.1D3[TIGIT] variable light Chain
DIVMTQSPDSLAVSLGERATINCKSSQTVLYSSNNKKYLAWYQQKPGQPPNLLIYWASTRESGVPDRFSGSGSGTDFTLTISSLQAEDVAVYYCQQYYSTPFTFGPGTKVEIK

SEQ ID NO: 37456 - protein, 17 aa, synthetic construct
  source 1..17: note = Description of Artificial Sequence: Synthetic peptide; note = 4.1D3[TIGIT] vlCDR1
KSSQTVLYSSNNKKYLA

SEQ ID NO: 37457 - protein, 7 aa, synthetic construct
  source 1..7: note = Description of Artificial Sequence: Synthetic peptide; note = 4.1D3[TIGIT] vlCDR2
WASTRES

SEQ ID NO: 37458 - protein, 9 aa, synthetic construct
  source 1..9: note = Description of Artificial Sequence: Synthetic peptide; note = 4.1D3[TIGIT] vlCDR3
QQYYSTPFT

SEQ ID NO: 37459 - protein, 126 aa, synthetic construct
  source 1..126: note = Description of Artificial Sequence: Synthetic polypeptide; note = 4.1D3.Q1E[TIGIT] variable heavy Chain
EVQLQQSGPGLVKPSQTLSLTCAISGDSVSSNSAAWNWIRQSPSRGLEWLGKTYYRFKWYSDYAVSVKGRITINPDTSKNQFSLQLNSVTPEDTAVFYCTRESTTYDLLAGPFDYWGQGTLVTVSS

SEQ ID NO: 37460 - protein, 7 aa, synthetic construct
  source 1..7: note = Description of Artificial Sequence: Synthetic peptide; note = 4.1D3.Q1E[TIGIT] vhCDR1
SNSAAWN

SEQ ID NO: 37461 - protein, 18 aa, synthetic construct
  source 1..18: note = Description of Artificial Sequence: Synthetic peptide; note = 4.1D3.Q1E[TIGIT] vhCDR2
KTYYRFKWYSDYAVSVKG

SEQ ID NO: 37462 - protein, 14 aa, synthetic construct
  source 1..14: note = Description of Artificial Sequence: Synthetic peptide; note = 4.1D3.Q1E[TIGIT] vhCDR3
ESTTYDLLAGPFDY

SEQ ID NO: 37463 - protein, 113 aa, synthetic construct; identical to SEQ ID NO: 37455
  source 1..113: note = Description of Artificial Sequence: Synthetic polypeptide; note = 4.1D3.Q1E[TIGIT] variable light Chain

SEQ ID NO: 37464 - protein, 17 aa, synthetic construct
  source 1..17: note = Description of Artificial Sequence: Synthetic peptide; note = 4.1D3.Q1E[TIGIT] vlCDR1
KSSQTVLYSSNNKKYLA

SEQ ID NO: 37465 - protein, 7 aa, synthetic construct
  source 1..7: note = Description of Artificial Sequence: Synthetic peptide; note = 4.1D3.Q1E[TIGIT] vlCDR2
WASTRES

SEQ ID NO: 37466 - protein, 9 aa, synthetic construct
  source 1..9: note = Description of Artificial Sequence: Synthetic peptide; note = 4.1D3.Q1E[TIGIT] vlCDR3
QQYYSTPFT

SEQ ID NO: 37467 - protein, 121 aa, synthetic construct
  source 1..121: note = Description of Artificial Sequence: Synthetic polypeptide; note = Hu14D7 VH1[TIGIT] variable heavy Chain
EVQLVESGGGLVQPGGSLKLSCAASGFTFSGAWMDWVRQAPGKGLEWVAEIRTKVNNHATNYGESVKGRFTISRDDSKSTVYLQMNSLRAEDTAVYYCRGALYDGFYFDYWGQGTLVTVSS

SEQ ID NO: 37468 - protein, 5 aa, synthetic construct
  source 1..5: note = Description of Artificial Sequence: Synthetic peptide; note = Hu14D7 VH1[TIGIT] vhCDR1
GAWMD

SEQ ID NO: 37469 - protein, 19 aa, synthetic construct
  source 1..19: note = Description of Artificial Sequence: Synthetic peptide; note = Hu14D7 VH1[TIGIT] vhCDR2
EIRTKVNNHATNYGESVKG

SEQ ID NO: 37470 - protein, 10 aa, synthetic construct
  source 1..10: note = Description of Artificial Sequence: Synthetic peptide; note = Hu14D7 VH1[TIGIT] vhCDR3
ALYDGFYFDY

SEQ ID NO: 37471 - protein, 121 aa, synthetic construct
  source 1..121: note = Description of Artificial Sequence: Synthetic polypeptide; note = Hu14D7 VH2[TIGIT] variable heavy Chain
EVQLVESGGGLVQPGGSLKLSCAASGFTFSGAWMDWVRQAPGKGLEWVAEIRTKVNNHATNYGESVKGRFTISRDDSKSSVYLQMNSLRAEDTAVYYCRGALYDGFYFDYWGQGTLVTVSS

SEQ ID NO: 37472 - protein, 5 aa, synthetic construct
  source 1..5: note = Description of Artificial Sequence: Synthetic peptide; note = Hu14D7 VH2[TIGIT] vhCDR1
GAWMD

SEQ ID NO: 37473 - protein, 19 aa, synthetic construct
  source 1..19: note = Description of Artificial Sequence: Synthetic peptide; note = Hu14D7 VH2[TIGIT] vhCDR2
EIRTKVNNHATNYGESVKG

SEQ ID NO: 37474 - protein, 10 aa, synthetic construct
  source 1..10: note = Description of Artificial Sequence: Synthetic peptide; note = Hu14D7 VH2[TIGIT] vhCDR3
ALYDGFYFDY

SEQ ID NO: 37475 - protein, 121 aa, synthetic construct
  source 1..121: note = Description of Artificial Sequence: Synthetic polypeptide; note = Hu14D7 VH3[TIGIT] variable heavy Chain
EVQLVESGGGLVQPGGSLKLSCAASGFTFSGAWMDWVRQAPGKGLEWVAEIRTKVNNHATNYGESVKGRFTISRDDSKNTVYLQMNSLRAEDTAVYYCRGALYDGFYFDYWGQGTLVTVSS

SEQ ID NO: 37476 - protein, 5 aa, synthetic construct
  source 1..5: note = Description of Artificial Sequence: Synthetic peptide; note = Hu14D7 VH3[TIGIT] vhCDR1
GAWMD

SEQ ID NO: 37477 - protein, 19 aa, synthetic construct
  source 1..19: note = Description of Artificial Sequence: Synthetic peptide; note = Hu14D7 VH3[TIGIT] vhCDR2
EIRTKVNNHATNYGESVKG

SEQ ID NO: 37478 - protein, 10 aa, synthetic construct
  source 1..10: note = Description of Artificial Sequence: Synthetic peptide; note = Hu14D7 VH3[TIGIT] vhCDR3
ALYDGFYFDY

SEQ ID NO: 37479 - protein, 108 aa, synthetic construct
  source 1..108: note = Description of Artificial Sequence: Synthetic polypeptide; note = Hu14D7 VL1[TIGIT] variable light Chain
EIVLTQSPATLSLSPGERATLSCSASSSVSSGYLYWYQQKPGQAPKLWIYGTSTLASGVPARFSGSGSGTDYTLTISSLEPEDFAVYYCHQWSSFPYTFGQGTKLEIK

SEQ ID NO: 37480 - protein, 12 aa, synthetic construct
  source 1..12: note = Description of Artificial Sequence: Synthetic peptide; note = Hu14D7 VL1[TIGIT] vlCDR1
SASSSVSSGYLY

SEQ ID NO: 37481 - protein, 7 aa, synthetic construct
  source 1..7: note = Description of Artificial Sequence: Synthetic peptide; note = Hu14D7 VL1[TIGIT] vlCDR2
GTSTLAS

SEQ ID NO: 37482 - protein, 9 aa, synthetic construct
  source 1..9: note = Description of Artificial Sequence: Synthetic peptide; note = Hu14D7 VL1[TIGIT] vlCDR3
HQWSSFPYT

SEQ ID NO: 37483 - protein, 108 aa, synthetic construct
  source 1..108: note = Description of Artificial Sequence: Synthetic polypeptide; note = Hu14D7 VL2[TIGIT] variable light Chain
EIVLTQSPATLSLSPGERATLSCSASSSVSSGYLYWYQQKPGQAPRLWIYGTSTLASGVPARFSGSGSGTDYTLTISSLEPEDFAVYYCHQWSSFPYTFGQGTKLEIK

SEQ ID NO: 37484 - protein, 12 aa, synthetic construct
  source 1..12: note = Description of Artificial Sequence: Synthetic peptide; note = Hu14D7 VL2[TIGIT] vlCDR1
SASSSVSSGYLY

SEQ ID NO: 37485 - protein, 7 aa, synthetic construct
  source 1..7: note = Description of Artificial Sequence: Synthetic peptide; note = Hu14D7 VL2[TIGIT] vlCDR2
GTSTLAS

SEQ ID NO: 37486 - protein, 9 aa, synthetic construct
  source 1..9: note = Description of Artificial Sequence: Synthetic peptide; note = Hu14D7 VL2[TIGIT] vlCDR3
HQWSSFPYT

SEQ ID NO: 37487 - protein, 108 aa, synthetic construct
  source 1..108: note = Description of Artificial Sequence: Synthetic polypeptide; note = Hu14D7 VL3[TIGIT] variable light Chain
EIVLTQSPATLSLSPGERATLSCSASSSVSSGYLYWYQQKPGQAPRLWIYGTSTLASGIPARFSGSGSGTDYTLTISSLEPEDFAVYYCHQWSSFPYTFGQGTKLEIK

SEQ ID NO: 37488 - protein, 12 aa, synthetic construct
  source 1..12: note = Description of Artificial Sequence: Synthetic peptide; note = Hu14D7 VL3[TIGIT] vlCDR1
SASSSVSSGYLY

SEQ ID NO: 37489 - protein, 7 aa, synthetic construct
  source 1..7: note = Description of Artificial Sequence: Synthetic peptide; note = Hu14D7 VL3[TIGIT] vlCDR2
GTSTLAS

SEQ ID NO: 37490 - protein, 9 aa, synthetic construct
  source 1..9: note = Description of Artificial Sequence: Synthetic peptide; note = Hu14D7 VL3[TIGIT] vlCDR3
HQWSSFPYT

SEQ ID NO: 37491 - protein, 119 aa, synthetic construct
  source 1..119: note = Description of Artificial Sequence: Synthetic polypeptide; note = Hu26B10 VH1[TIGIT] variable heavy Chain
EVQLVQSGAEVKKPGASVKISCKTSGYTFTEFTMHWVKQAPGKGLEWIGGLKPDNGGISYNQKFKGRATLTVDKSTNTAYMELSSLRSEDTAVYYCARGAYYRYDADYWGQGTLVTVSS

SEQ ID NO: 37492 - protein, 5 aa, synthetic construct
  source 1..5: note = Description of Artificial Sequence: Synthetic peptide; note = Hu26B10 VH1[TIGIT] vhCDR1
EFTMH

SEQ ID NO: 37493 - protein, 17 aa, synthetic construct
  source 1..17: note = Description of Artificial Sequence: Synthetic peptide; note = Hu26B10 VH1[TIGIT] vhCDR2
GLKPDNGGISYNQKFKG

SEQ ID NO: 37494 - protein, 10 aa, synthetic construct
  source 1..10: note = Description of Artificial Sequence: Synthetic peptide; note = Hu26B10 VH1[TIGIT] vhCDR3
GAYYRYDADY

SEQ ID NO: 37495 - protein, 119 aa, synthetic construct
  source 1..119: note = Description of Artificial Sequence: Synthetic polypeptide; note = Hu26B10 VH2[TIGIT] variable heavy Chain
EVQLVQSGAEVKKPGASVKISCKTSGYTFTEFTMHWVRQAPGKGLEWIGGLKPDNGGISYNQKFKGRATLTVDKSTSTAYMELSSLRSEDTAVYYCARGAYYRYDADYWGQGTLVTVSS

SEQ ID NO: 37496 - protein, 5 aa, synthetic construct
  source 1..5: note = Description of Artificial Sequence: Synthetic peptide; note = Hu26B10 VH2[TIGIT] vhCDR1
EFTMH

SEQ ID NO: 37497 - protein, 17 aa, synthetic construct
  source 1..17: note = Description of Artificial Sequence: Synthetic peptide; note = Hu26B10 VH2[TIGIT] vhCDR2
GLKPDNGGISYNQKFKG

SEQ ID NO: 37498 - protein, 10 aa, synthetic construct
  source 1..10: note = Description of Artificial Sequence: Synthetic peptide; note = Hu26B10 VH2[TIGIT] vhCDR3
GAYYRYDADY

SEQ ID NO: 37499 - protein, 119 aa, synthetic construct
  source 1..119: note = Description of Artificial Sequence: Synthetic polypeptide; note = Hu26B10 VH3[TIGIT] variable heavy Chain
EVQLVQSGAEVKKPGASVKISCKVSGYTFTEFTMHWVRQAPGKGLEWIGGLKPDNGGISYNQKFKGRATLTVDTSTSTAYMELSSLRSEDTAVYYCARGAYYRYDADYWGQGTLVTVSS

SEQ ID NO: 37500 - protein, 5 aa, synthetic construct
  source 1..5: note = Description of Artificial Sequence: Synthetic peptide; note = Hu26B10 VH3[TIGIT] vhCDR1
EFTMH

SEQ ID NO: 37501 - protein, 17 aa, synthetic construct
  source 1..17: note = Description of Artificial Sequence: Synthetic peptide; note = Hu26B10 VH3[TIGIT] vhCDR2
GLKPDNGGISYNQKFKG

SEQ ID NO: 37502 - protein, 10 aa, synthetic construct
  source 1..10: note = Description of Artificial Sequence: Synthetic peptide; note = Hu26B10 VH3[TIGIT] vhCDR3
GAYYRYDADY

SEQ ID NO: 37503 - protein, 107 aa, synthetic construct
  source 1..107: note = Description of Artificial Sequence: Synthetic polypeptide; note = Hu26B10 VL1[TIGIT] variable light Chain
DIQLTQSPSSLSASVGDRVTITCKASQDVKTAVAWYQQKPGKAPKLLIYSASYRNTGVPDRFSGSGSGTDFTFTISSLQPEDFATYYCQQHYSTPFTFGQGTKLEIK

SEQ ID NO: 37504 - protein, 11 aa, synthetic construct
  source 1..11: note = Description of Artificial Sequence: Synthetic peptide; note = Hu26B10 VL1[TIGIT] vlCDR1
KASQDVKTAVA

SEQ ID NO: 37505 - protein, 7 aa, synthetic construct
  source 1..7: note = Description of Artificial Sequence: Synthetic peptide; note = Hu26B10 VL1[TIGIT] vlCDR2
SASYRNT

SEQ ID NO: 37506 - protein, 9 aa, synthetic construct
  source 1..9: note = Description of Artificial Sequence: Synthetic peptide; note = Hu26B10 VL1[TIGIT] vlCDR3
QQHYSTPFT

SEQ ID NO: 37507 - protein, 107 aa, synthetic construct
  source 1..107: note = Description of Artificial Sequence: Synthetic polypeptide; note = Hu26B10 VL2[TIGIT] variable light Chain
DIQLTQSPSSLSASVGDRVTITCKASQDVKTAVAWYQQKPGKAPKLLIYSASYRNTGVPSRFSGSGSGTDFTFTISSLQPEDFATYYCQQHYSTPFTFGQGTKLEIK

SEQ ID NO: 37508 - protein, 11 aa, synthetic construct
  source 1..11: note = Description of Artificial Sequence: Synthetic peptide; note = Hu26B10 VL2[TIGIT] vlCDR1
KASQDVKTAVA

SEQ ID NO: 37509 - protein, 7 aa, synthetic construct
  source 1..7: note = Description of Artificial Sequence: Synthetic peptide; note = Hu26B10 VL2[TIGIT] vlCDR2
SASYRNT

SEQ ID NO: 37510 - protein, 9 aa, synthetic construct
  source 1..9: note = Description of Artificial Sequence: Synthetic peptide; note = Hu26B10 VL2[TIGIT] vlCDR3
QQHYSTPFT

SEQ ID NO: 37511 - protein, 107 aa, synthetic construct
  source 1..107: note = Description of Artificial Sequence: Synthetic polypeptide; note = Hu26B10 VL3[TIGIT] variable light Chain
DIQLTQSPSSLSASVGDRVTITCKASQDVKTAVAWYQQKPGKAPKLLIYSASYRNTGVPSRFSGSGSGTDFTLTISSLQPEDFATYYCQQHYSTPFTFGQGTKLEIK

SEQ ID NO: 37512 - protein, 11 aa, synthetic construct
  source 1..11: note = Description of Artificial Sequence: Synthetic peptide; note = Hu26B10 VL3[TIGIT] vlCDR1
KASQDVKTAVA

SEQ ID NO: 37513 - protein, 7 aa, synthetic construct
  source 1..7: note = Description of Artificial Sequence: Synthetic peptide; note = Hu26B10 VL3[TIGIT] vlCDR2
SASYRNT

SEQ ID NO: 37514 - protein, 9 aa, synthetic construct
  source 1..9: note = Description of Artificial Sequence: Synthetic peptide; note = Hu26B10 VL3[TIGIT] vlCDR3
QQHYSTPFT

SEQ ID NO: 37515 - protein, 119 aa, synthetic construct
  source 1..119: note = Description of Artificial Sequence: Synthetic polypeptide; note = MEB125.31C6.A1.205 VH4/VL1[TIGIT] variable heavy Chain
EVQLVQSGAEVKKPGASVKVSCKASGYTFSSYVMHWVRQAPGQGLEWIGYIDPYNDGAKYAQKFQGRVTLTSDKSTSTVYMELSSLRSEDTAVYYCARGGPYGWYFDVWGQGTTVTVSS

SEQ ID NO: 37516 - protein, 5 aa, synthetic construct
  source 1..5: note = Description of Artificial Sequence: Synthetic peptide; note = MEB125.31C6.A1.205 VH4/VL1[TIGIT] vhCDR1
SYVMH

SEQ ID NO: 37517 - protein, 17 aa, synthetic construct
  source 1..17: note = Description of Artificial Sequence: Synthetic peptide; note = MEB125.31C6.A1.205 VH4/VL1[TIGIT] vhCDR2
YIDPYNDGAKYAQKFQG

SEQ ID NO: 37518 - protein, 10 aa, synthetic construct
  source 1..10: note = Description of Artificial Sequence: Synthetic peptide; note = MEB125.31C6.A1.205 VH4/VL1[TIGIT] vhCDR3
GGPYGWYFDV

SEQ ID NO: 37519 - protein, 107 aa, synthetic construct
  source 1..107: note = Description of Artificial Sequence: Synthetic polypeptide; note = MEB125.31C6.A1.205 VH4/VL1[TIGIT] variable heavy Chain
DIQMTQSPSSLSASVGDRVTITCRASEHIYSYLSWYQQKPGKAPKLLIYNAKTLAEGVPSRFSGSGSGTDFTLTISSLQPEDFATYYCQHHFGSPLTFGQGTRLEIK

SEQ ID NO: 37520 - protein, 11 aa, synthetic construct
  source 1..11: note = Description of Artificial Sequence: Synthetic peptide; note = MEB125.31C6.A1.205 VH4/VL1[TIGIT] vhCDR1
RASEHIYSYLS

SEQ ID NO: 37521 - protein, 7 aa, synthetic construct
  source 1..7: note = Description of Artificial Sequence: Synthetic peptide; note = MEB125.31C6.A1.205 VH4/VL1[TIGIT] vhCDR2
NAKTLAE

SEQ ID NO: 37522 - protein, 9 aa, synthetic construct
  source 1..9: note = Description of Artificial Sequence: Synthetic peptide; note = MEB125.31C6.A1.205 VH4/VL1[TIGIT] vhCDR3
QHHFGSPLT

SEQ ID NO: 37523 - protein, 119 aa, synthetic construct
  source 1..119: note = Description of Artificial Sequence: Synthetic polypeptide; note = MEB125.31C6.A1.205 VH5/VL4[TIGIT] variable heavy Chain
EVQLVQSGAEVKKPGSSVKVSCKASGYTFSSYVMHWVRQAPGQGLEWIGYIDPYNDGAKYAQKFQGRVTLTSDKSTSTAYMELSSLRSEDTAVYYCARGGPYGWYFDVWGQGTTVTVSS

SEQ ID NO: 37524 - protein, 5 aa, synthetic construct
  source 1..5: note = Description of Artificial Sequence: Synthetic peptide; note = MEB125.31C6.A1.205 VH5/VL4[TIGIT] vhCDR1
SYVMH

SEQ ID NO: 37525 - protein, 17 aa, synthetic construct
  source 1..17: note = Description of Artificial Sequence: Synthetic peptide; note = MEB125.31C6.A1.205 VH5/VL4[TIGIT] vhCDR2
YIDPYNDGAKYAQKFQG

SEQ ID NO: 37526 - protein, 10 aa, synthetic construct
  source 1..10: note = Description of Artificial Sequence: Synthetic peptide; note = MEB125.31C6.A1.205 VH5/VL4[TIGIT] vhCDR3
GGPYGWYFDV

SEQ ID NO: 37527 - protein, 107 aa, synthetic construct
  source 1..107: note = Description of Artificial Sequence: Synthetic polypeptide; note = MEB125.31C6.A1.205 VH5/VL4[TIGIT] variable heavy Chain
DIQMTQSPSSLSASVGDRVTITCRASEHIYSYLSWYQQKPGKVPKLLIYNAKTLAEGVPSRFSGSGSGTQFTLTISSLQPEDVATYYCQHHFGSPLTFGQGTRLEIK

SEQ ID NO: 37528 - protein, 11 aa, synthetic construct
  source 1..11: note = Description of Artificial Sequence: Synthetic peptide; note = MEB125.31C6.A1.205 VH5/VL4[TIGIT] vhCDR1
RASEHIYSYLS

SEQ ID NO: 37529 - protein, 7 aa, synthetic construct
  source 1..7: note = Description of Artificial Sequence: Synthetic peptide; note = MEB125.31C6.A1.205 VH5/VL4[TIGIT] vhCDR2
NAKTLAE

SEQ ID NO: 37530 - protein, 9 aa, synthetic construct
  source 1..9: note = Description of Artificial Sequence: Synthetic peptide; note = MEB125.31C6.A1.205 VH5/VL4[TIGIT] vhCDR3
QHHFGSPLT

SEQ ID NO: 37531 - protein, 119 aa, synthetic construct; identical to SEQ ID NO: 37523
  source 1..119: note = Description of Artificial Sequence: Synthetic polypeptide; note = MEB125.31C6.A1.205 VH5/VL3[TIGIT] variable heavy Chain

SEQ ID NO: 37532 - protein, 5 aa, synthetic construct
  source 1..5: note = Description of Artificial Sequence: Synthetic peptide; note = MEB125.31C6.A1.205 VH5/VL3[TIGIT] vhCDR1
SYVMH

SEQ ID NO: 37533 - protein, 17 aa, synthetic construct
  source 1..17: note = Description of Artificial Sequence: Synthetic peptide; note = MEB125.31C6.A1.205 VH5/VL3[TIGIT] vhCDR2
YIDPYNDGAKYAQKFQG

SEQ ID NO: 37534 - protein, 10 aa, synthetic construct
  source 1..10: note = Description of Artificial Sequence: Synthetic peptide; note = MEB125.31C6.A1.205 VH5/VL3[TIGIT] vhCDR3
GGPYGWYFDV

SEQ ID NO: 37535 - protein, 107 aa, synthetic construct
  source 1..107: note = Description of Artificial Sequence: Synthetic polypeptide; note = MEB125.31C6.A1.205 VH5/VL3[TIGIT] variable heavy Chain
DIQMTQSPSSLSASVGDRVTITCRASEHIYSYLSWYQQKPGKVPKLLIYNAKTLAEGVPSRFSGSGSGTDFTLTISSLQPEDVATYYCQHHFGSPLTFGQGTRLEIK

SEQ ID NO: 37536 - protein, 11 aa, synthetic construct
  source 1..11: note = Description of Artificial Sequence: Synthetic peptide; note = MEB125.31C6.A1.205 VH5/VL3[TIGIT] vhCDR1
RASEHIYSYLS

SEQ ID NO: 37537 - protein, 7 aa, synthetic construct
  source 1..7: note = Description of Artificial Sequence: Synthetic peptide; note = MEB125.31C6.A1.205 VH5/VL3[TIGIT] vhCDR2
NAKTLAE

SEQ ID NO: 37538 - protein, 9 aa, synthetic construct
  source 1..9: note = Description of Artificial Sequence: Synthetic peptide; note = MEB125.31C6.A1.205 VH5/VL3[TIGIT] vhCDR3
QHHFGSPLT

SEQ ID NO: 37539 - protein, 118 aa, synthetic construct
  source 1..118: note = Description of Artificial Sequence: Synthetic polypeptide; note = 15A6[TIGIT] variable heavy Chain
QLQLQESGPGLVKPSETLSLTCTVSGGSISSSRYFWGWIRQPPGKGLEWIGYIYYRGSTYYNPSLKSRVTIAVDTSKNQFSLKLSSVTAADTAVYYCASSSAWYFDYWGQGNLVTVSS

SEQ ID NO: 37540 - protein, 7 aa, synthetic construct
  source 1..7: note = Description of Artificial Sequence: Synthetic peptide; note = 15A6[TIGIT] vhCDR1
SSRYFWG

SEQ ID NO: 37541 - protein, 16 aa, synthetic construct
  source 1..16: note = Description of Artificial Sequence: Synthetic peptide; note = 15A6[TIGIT] vhCDR2
YIYYRGSTYYNPSLKS

SEQ ID NO: 37542 - protein, 8 aa, synthetic construct
  source 1..8: note = Description of Artificial Sequence: Synthetic peptide; note = 15A6[TIGIT] vhCDR3
SSAWYFDY

SEQ ID NO: 37543 - protein, 107 aa, synthetic construct
  source 1..107: note = Description of Artificial Sequence: Synthetic polypeptide; note = 15A6[TIGIT] variable light Chain
EIVLTQSPGTLSLSPGERATLSCRASQSVSSSYLAWYQQKPGQAPRLLIYGASSRATGIPDRFSGSGSGTDFTLTISRLEPEDFAVYYCQQYGSLYTFGQGTKLEIK

SEQ ID NO: 37544 - protein, 12 aa, synthetic construct
  source 1..12: note = Description of Artificial Sequence: Synthetic peptide; note = 15A6[TIGIT] vlCDR1
RASQSVSSSYLA

SEQ ID NO: 37545 - protein, 7 aa, synthetic construct
  source 1..7: note = Description of Artificial Sequence: Synthetic peptide; note = 15A6[TIGIT] vlCDR2
GASSRAT

SEQ ID NO: 37546 - protein, 8 aa, synthetic construct
  source 1..8: note = Description of Artificial Sequence: Synthetic peptide; note = 15A6[TIGIT] vlCDR3
QQYGSLYT

SEQ ID NO: 37547 - protein, 130 aa, synthetic construct
  source 1..130: note = Description of Artificial Sequence: Synthetic polypeptide; note = 22G2[TIGIT] variable heavy Chain
QVHLQESGPGLVKPSETLSLTCTVSGGSVSSGIYYWSWIRQPPGKGLEWIGYIYYSGSTNYNPSLKSRVTISVDTSKNQFSLKLSSVTAADTAVYYCARDYYVSGNYYNVDYYFFGVDVWGQGTTVTVSS

SEQ ID NO: 37548 - protein, 7 aa, synthetic construct
  source 1..7: note = Description of Artificial Sequence: Synthetic peptide; note = 22G2[TIGIT] vhCDR1
SGIYYWS

SEQ ID NO: 37549 - protein, 16 aa, synthetic construct
  source 1..16: note = Description of Artificial Sequence: Synthetic peptide; note = 22G2[TIGIT] vhCDR2
YIYYSGSTNYNPSLKS

SEQ ID NO: 37550 - protein, 20 aa, synthetic construct
  source 1..20: note = Description of Artificial Sequence: Synthetic peptide; note = 22G2[TIGIT] vhCDR3
DYYVSGNYYNVDYYFFGVDV

SEQ ID NO: 37551 - protein, 109 aa, synthetic construct
  source 1..109: note = Description of Artificial Sequence: Synthetic polypeptide; note = 22G2[TIGIT] variable light Chain
EIVLTQSPATLSLSPGERATLSCRASQSVSSYLAWYQQKPGQAPRLLIYDASNRATGIPARFSGSGSGTDFTLTISSLEPEDFAVYYCQQRSNWPPLFTFGPGTKVDIK

SEQ ID NO: 37552 - protein, 11 aa, synthetic construct
  source 1..11: note = Description of Artificial Sequence: Synthetic peptide; note = 22G2[TIGIT] vlCDR1
RASQSVSSYLA

SEQ ID NO: 37553 - protein, 7 aa, synthetic construct
  source 1..7: note = Description of Artificial Sequence: Synthetic peptide; note = 22G2[TIGIT] vlCDR2
DASNRAT

SEQ ID NO: 37554 - protein, 11 aa, synthetic construct
  source 1..11: note = Description of Artificial Sequence: Synthetic peptide; note = 22G2[TIGIT] vlCDR3
QQRSNWPPLFT

SEQ ID NO: 37555 - protein, 126 aa, synthetic construct
  source 1..126: note = Description of Artificial Sequence: Synthetic polypeptide; note = 11G11[TIGIT] variable heavy Chain
QLQLQESGPGLVKPSETLSLTCTVSGGSISSSSHYWGWIRQPPGKGLEWIGNIFYSGHTYYNPSLKSRVTISVDTSKNQFSLKLSSVTAADTAVYYCARQGLLWFGGLSPYYFDYWGQGTLVTVSS

SEQ ID NO: 37556 - protein, 7 aa, synthetic construct
  source 1..7: note = Description of Artificial Sequence: Synthetic peptide; note = 11G11[TIGIT] vhCDR1
SSSHYWG

SEQ ID NO: 37557 - protein, 16 aa, synthetic construct
  source 1..16: note = Description of Artificial Sequence: Synthetic peptide; note = 11G11[TIGIT] vhCDR2
NIFYSGHTYYNPSLKS

SEQ ID NO: 37558 - protein, 16 aa, synthetic construct
  source 1..16: note = Description of Artificial Sequence: Synthetic peptide; note = 11G11[TIGIT] vhCDR3
QGLLWFGGLSPYYFDY

SEQ ID NO: 37559 - protein, 106 aa, synthetic construct
  source 1..106: note = Description of Artificial Sequence: Synthetic polypeptide; note = 11G11[TIGIT] variable light Chain
EIVLTQSPATLSLSPGERATLSCRASQSVSSYLAWYQQKPGQAPRLLIYDASNRATGIPARFSGSGSGTDFTLTISSLEPEDFAVYYCQQRSNWPTFGQGTKLEIK

SEQ ID NO: 37560 - protein, 11 aa, synthetic construct
  source 1..11: note = Description of Artificial Sequence: Synthetic peptide; note = 11G11[TIGIT] vlCDR1
RASQSVSSYLA

SEQ ID NO: 37561 - protein, 7 aa, synthetic construct
  source 1..7: note = Description of Artificial Sequence: Synthetic peptide; note = 11G11[TIGIT] vlCDR2
DASNRAT

SEQ ID NO: 37562 - protein, 8 aa, synthetic construct
  source 1..8: note = Description of Artificial Sequence: Synthetic peptide; note = 11G11[TIGIT] vlCDR3
QQRSNWPT

SEQ ID NO: 37563 - protein, 128 aa, synthetic construct
  source 1..128: note = Description of Artificial Sequence: Synthetic polypeptide; note = 10D7[TIGIT] variable heavy Chain
QGQLVQSGAEVKKPGSSVKVSCKASGGIFRNYAISWVRQAPGQGLEWMGGIIPFFGTANYAQKFQGRVTITADESTSTAYMELSSLRSEDTAVYYCARGGAAAGTTRYGYYYYGMDVWGQGTTVTVSS

SEQ ID NO: 37564 - protein, 5 aa, synthetic construct
  source 1..5: note = Description of Artificial Sequence: Synthetic peptide; note = 10D7[TIGIT] vhCDR1
NYAIS

SEQ ID NO: 37565 - protein, 17 aa, synthetic construct
  source 1..17: note = Description of Artificial Sequence: Synthetic peptide; note = 10D7[TIGIT] vhCDR2
GIIPFFGTANYAQKFQG

SEQ ID NO: 37566 - protein, 19 aa, synthetic construct
  source 1..19: note = Description of Artificial Sequence: Synthetic peptide; note = 10D7[TIGIT] vhCDR3
GGAAAGTTRYGYYYYGMDV

SEQ ID NO: 37567 - protein, 107 aa, synthetic construct
  source 1..107: note = Description of Artificial Sequence: Synthetic polypeptide; note = 10D7[TIGIT] variable light Chain
DIQMTQSPSSLSASVGDRVTITCRASQGISSWLAWYQQKPEKAPKSLIYAASSLQSGVPSRFSGSGSGTDFTLTISSLQPEDFATYYCQQYNSYPITFGQGTRLEIK

SEQ ID NO: 37568 - protein, 11 aa, synthetic construct
  source 1..11: note = Description of Artificial Sequence: Synthetic peptide; note = 10D7[TIGIT] vlCDR1
RASQGISSWLA

SEQ ID NO: 37569 - protein, 7 aa, synthetic construct
  source 1..7: note = Description of Artificial Sequence: Synthetic peptide; note = 10D7[TIGIT] vlCDR2
AASSLQS

SEQ ID NO: 37570 - protein, 9 aa, synthetic construct
  source 1..9: note = Description of Artificial Sequence: Synthetic peptide; note = 10D7[TIGIT] vlCDR3
QQYNSYPIT

SEQ ID NO: 37571 - protein, 116 aa, synthetic construct
  source 1..116: note = Description of Artificial Sequence: Synthetic polypeptide; note = 313R19[TIGIT] variable heavy Chain
QVQLQESGPGLVKPSETLSLTCTVSGFSLSSSYMSWIRQPPGKGLEWIGIIGSNGNTYYANWAKGRVTISKSSNQVSLKLSSVTAADTAVYYCARGGYRTSGMDPWGQGTLVTVSS

SEQ ID NO: 37572 - protein, 5 aa, synthetic construct
  source 1..5: note = Description of Artificial Sequence: Synthetic peptide; note = 313R19[TIGIT] vhCDR1
SSYMS

SEQ ID NO: 37573 - protein, 14 aa, synthetic construct
  source 1..14: note = Description of Artificial Sequence: Synthetic peptide; note = 313R19[TIGIT] vhCDR2
IIGSNGNTYYANWA

SEQ ID NO: 37574 - protein, 10 aa, synthetic construct
  source 1..10: note = Description of Artificial Sequence: Synthetic peptide; note = 313R19[TIGIT] vhCDR3
GGYRTSGMDP

SEQ ID NO: 37575 - protein, 110 aa, synthetic construct
  source 1..110: note = Description of Artificial Sequence: Synthetic polypeptide; note = 313R19[TIGIT] variable light Chain
DIQMTQSPSSLSASVGDRVTITCQASQNIYSDLAWYQQKPGKAPKLLIYRASTLASGVPSRFSGSGSGTDFTLTISSLQPEDFATYYCQQEHLVAWIYNVFGQGTKVEIK

SEQ ID NO: 37576 - protein, 11 aa, synthetic construct
  source 1..11: note = Description of Artificial Sequence: Synthetic peptide; note = 313R19[TIGIT] vlCDR1
QASQNIYSDLA

SEQ ID NO: 37577 - protein, 7 aa, synthetic construct
  source 1..7: note = Description of Artificial Sequence: Synthetic peptide; note = 313R19[TIGIT] vlCDR2
RASTLAS

SEQ ID NO: 37578 - protein, 12 aa, synthetic construct
  source 1..12: note = Description of Artificial Sequence: Synthetic peptide; note = 313R19[TIGIT] vlCDR3
QQEHLVAWIYNV

SEQ ID NO: 37579 - protein, 118 aa, synthetic construct
  source 1..118: note = Description of Artificial Sequence: Synthetic polypeptide; note = 313M32[TIGIT] variable heavy Chain
QVQLQESGPGLVKPSETLSLTCAVSGYSITSDYAWNWIRQPPGKGLEWIGYISYSGSTSYNPSLRSRVTISRDTSKNQFFLKLSSVTAADTAVYYCARRQVGLGFAYWGQGTLVTVSS

SEQ ID NO: 37580 - protein, 6 aa, synthetic construct
  source 1..6: note = Description of Artificial Sequence: Synthetic peptide; note = 313M32[TIGIT] vhCDR1
SDYAWN

SEQ ID NO: 37581 - protein, 16 aa, synthetic construct
  source 1..16: note = Description of Artificial Sequence: Synthetic peptide; note = 313M32[TIGIT] vhCDR2
YISYSGSTSYNPSLRS

SEQ ID NO: 37582 - protein, 9 aa, synthetic construct
  source 1..9: note = Description of Artificial Sequence: Synthetic peptide; note = 313M32[TIGIT] vhCDR3
RQVGLGFAY

SEQ ID NO: 37583 - protein, 99 aa, synthetic construct
  source 1..99: note = Description of Artificial Sequence: Synthetic polypeptide; note = 313M32[TIGIT] variable light Chain
DIQMTQSPSSLSASVGDRVTITCKASQDVSTAVAWYQQKPGKAPKLLIYSASYRYTGVPSRFSGSGSGTDFTFTISSLQPEDIATYYCQQHYSTPWTFG

SEQ ID NO: 37584 - protein, 11 aa, synthetic construct
  source 1..11: note = Description of Artificial Sequence: Synthetic peptide; note = 313M32[TIGIT] vlCDR1
KASQDVSTAVA

SEQ ID NO: 37585 - protein, 7 aa, synthetic construct
  source 1..7: note = Description of Artificial Sequence: Synthetic peptide; note = 313M32[TIGIT] vlCDR2
SASYRYT

SEQ ID NO: 37586 - protein, 9 aa, synthetic construct
  source 1..9: note = Description of Artificial Sequence: Synthetic peptide; note = 313M32[TIGIT] vlCDR3
QQHYSTPWT

SEQ ID NO: 37587 - protein, 113 aa, synthetic construct
  source 1..113: note = Description of Artificial Sequence: Synthetic polypeptide; note = APE5137[TIM-3] variable heavy Chain
EVQLLESGGGLVQPGGSLRLSCAAASGFTFSSYDMSWVRQAPGKGLDWVSTISGGGTYTYYQDSVKGRFTISRDNSKNTLYLQMNSLRAEDTAVYYCASMDYWGQGTTVTVSS

SEQ ID NO: 37588 - protein, 6 aa, synthetic construct
  source 1..6: note = Description of Artificial Sequence: Synthetic peptide; note = APE5137[TIM-3] vhCDR1
SSYDMS

SEQ ID NO: 37589 - protein, 17 aa, synthetic construct
  source 1..17: note = Description of Artificial Sequence: Synthetic peptide; note = APE5137[TIM-3] vhCDR2
TISGGGTYTYYQDSVKG

SEQ ID NO: 37590 - skipped

SEQ ID NO: 37591 - protein, 107 aa, synthetic construct
  source 1..107: note = Description of Artificial Sequence: Synthetic polypeptide; note = APE5137[TIM-3] variable light Chain
DIQMTQSPSSLSASVGDRVTITCRASQSIRRYLNWYHQKPGKAPKLLIYGASTLQSGVPSRFSGSGSGTDFTLTISSLQPEDFAVYYCQQSHSAPLTFGGGTKVEIK

SEQ ID NO: 37592 - protein, 11 aa, synthetic construct
  source 1..11: note = Description of Artificial Sequence: Synthetic peptide; note = APE5137[TIM-3] vlCDR1
RASQSIRRYLN

SEQ ID NO: 37593 - protein, 7 aa, synthetic construct
  source 1..7: note = Description of Artificial Sequence: Synthetic peptide; note = APE5137[TIM-3] vlCDR2
GASTLQS

SEQ ID NO: 37594 - protein, 9 aa, synthetic construct
  source 1..9: note = Description of Artificial Sequence: Synthetic peptide; note = APE5137[TIM-3] vlCDR3
QQSHSAPLT

SEQ ID NO: 37595 - protein, 119 aa, synthetic construct
  source 1..119: note = Description of Artificial Sequence: Synthetic polypeptide; note = APE5121[TIM-3] variable heavy Chain
EVQVLESGGGLVQPGGSLRLYCVASGFTFSGSYAMSWVRQAPGKGLEWVSAISGSGGSTYYADSVKGRFTISRDNSKNTLYLQMNSLRAEDTAVYYCAKKYYVGPADYWGQGTLVTVSS

SEQ ID NO: 37596 - protein, 6 aa, synthetic construct
  source 1..6: note = Description of Artificial Sequence: Synthetic peptide; note = APE5121[TIM-3] vhCDR1
GSYAMS

SEQ ID NO: 37597 - protein, 17 aa, synthetic construct
  source 1..17: note = Description of Artificial Sequence: Synthetic peptide; note = APE5121[TIM-3] vhCDR2
AISGSGGSTYYADSVKG

SEQ ID NO: 37598 - protein, 9 aa, synthetic construct
  source 1..9: note = Description of Artificial Sequence: Synthetic peptide; note = APE5121[TIM-3] vhCDR3
KYYVGPADY

SEQ ID NO: 37599 - protein, 113 aa, synthetic construct
  source 1..113: note = Description of Artificial Sequence: Synthetic polypeptide; note = APE5121[TIM-3] variable light Chain
DIVMTQSPDSLAVSLGERATINCKSSQSVLYSSNNKNYLAWYQHKPGQPPKLLIYWASTRESGVPDRFSGSGSGTDFTLTISSLQAEDVAVYYCQQYYSSPLTFGGGTKIEVK

SEQ ID NO: 37600 - protein, 17 aa, synthetic construct
  source 1..17: note = Description of Artificial Sequence: Synthetic peptide; note = APE5121[TIM-3] vlCDR1
KSSQSVLYSSNNKNYLA

SEQ ID NO: 37601 - protein, 7 aa, synthetic construct
  source 1..7: note = Description of Artificial Sequence: Synthetic peptide; note = APE5121[TIM-3] vlCDR2
WASTRES

SEQ ID NO: 37602 - protein, 9 aa, synthetic construct
  source 1..9: note = Description of Artificial Sequence: Synthetic peptide; note = APE5121[TIM-3] vlCDR3
QQYYSSPLT

SEQ ID NO: 37603 - protein, 118 aa, synthetic construct
  source 1..118: note = Description of Artificial Sequence: Synthetic polypeptide; note = ABTIM3-hum03[TIM-3] variable heavy Chain
QVQLVQSGAEVKKPGASVKVSCKASGYTFTSYNMHWVRQAPGQGLEWIGDIYPGQGDTSYNQKFKGRATMTADKSTSTVYMELSSLRSEDTAVYYCARVGGAFPMDYWGQGTLVTVSS

SEQ ID NO: 37604 - protein, 5 aa, synthetic construct
  source 1..5: note = Description of Artificial Sequence: Synthetic peptide; note = ABTIM3-hum03[TIM-3] vhCDR1
SYNMH

SEQ ID NO: 37605 - protein, 17 aa, synthetic construct
  source 1..17: note = Description of Artificial Sequence: Synthetic peptide; note = ABTIM3-hum03[TIM-3] vhCDR2
DIYPGQGDTSYNQKFKG

SEQ ID NO: 37606 - protein, 9 aa, synthetic construct
  source 1..9: note = Description of Artificial Sequence: Synthetic peptide; note = ABTIM3-hum03[TIM-3] vhCDR3
VGGAFPMDY

SEQ ID NO: 37607 - protein, 111 aa, synthetic construct
  source 1..111: note = Description of Artificial Sequence: Synthetic polypeptide; note = ABTIM3-hum03[TIM-3] variable light Chain
DIVLTQSPDSLAVSLGERATINCRASESVEYYGTSLMQWYQQKPGQPPKLLIYAASNVESGVPDRFSGSGSGTDFTLTISSLQAEDVAVYYCQQSRKDPSTFGGGTKVEIK

SEQ ID NO: 37608 - protein, 15 aa, synthetic construct
  source 1..15: note = Description of Artificial Sequence: Synthetic peptide; note = ABTIM3-hum03[TIM-3] vlCDR1
RASESVEYYGTSLMQ

SEQ ID NO: 37609 - protein, 7 aa, synthetic construct
  source 1..7: note = Description of Artificial Sequence: Synthetic peptide; note = ABTIM3-hum03[TIM-3] vlCDR2
AASNVES

SEQ ID NO: 37610 - protein, 9 aa, synthetic construct
  source 1..9: note = Description of Artificial Sequence: Synthetic peptide; note = ABTIM3-hum03[TIM-3] vlCDR3
QQSRKDPST

SEQ ID NO: 37611 - protein, 118 aa, synthetic construct; identical to SEQ ID NO: 20786
  source 1..118: note = Description of Artificial Sequence: Synthetic polypeptide; note = ABTIM3-hum11[TIM-3] variable heavy Chain

SEQ ID NO: 37612 - protein, 5 aa, synthetic construct
  source 1..5: note = Description of Artificial Sequence: Synthetic peptide; note = ABTIM3-hum11[TIM-3] vhCDR1
SYNMH

SEQ ID NO: 37613 - protein, 17 aa, synthetic construct
  source 1..17: note = Description of Artificial Sequence: Synthetic peptide; note = ABTIM3-hum11[TIM-3] vhCDR2
DIYPGNGDTSYNQKFKG

SEQ ID NO: 37614 - protein, 9 aa, synthetic construct
  source 1..9: note = Description of Artificial Sequence: Synthetic peptide; note = ABTIM3-hum11[TIM-3] vhCDR3
VGGAFPMDY

SEQ ID NO: 37615 - protein, 111 aa, synthetic construct; identical to SEQ ID NO: 20791
  source 1..111: note = Description of Artificial Sequence: Synthetic polypeptide; note = ABTIM3-hum11[TIM-3] variable light Chain

SEQ ID NO: 37616 - protein, 15 aa, synthetic construct
  source 1..15: note = Description of Artificial Sequence: Synthetic peptide; note = ABTIM3-hum11[TIM-3] vlCDR1
RASESVEYYGTSLMQ

SEQ ID NO: 37617 - protein, 7 aa, synthetic construct
  source 1..7: note = Description of Artificial Sequence: Synthetic peptide; note = ABTIM3-hum11[TIM-3] vlCDR2
AASNVES

SEQ ID NO: 37618 - protein, 9 aa, synthetic construct
  source 1..9: note = Description of Artificial Sequence: Synthetic peptide; note = ABTIM3-hum11[TIM-3] vlCDR3
QQSRKDPST

SEQ ID NO: 37619 - protein, 118 aa, synthetic construct; identical to SEQ ID NO: 37603
  source 1..118: note = Description of Artificial Sequence: Synthetic polypeptide; note = ABTIM3-hum21[TIM-3] variable heavy Chain

SEQ ID NO: 37620 - protein, 5 aa, synthetic construct
  source 1..5: note = Description of Artificial Sequence: Synthetic peptide; note = ABTIM3-hum21[TIM-3] vhCDR1
SYNMH

SEQ ID NO: 37621 - protein, 17 aa, synthetic construct
  source 1..17: note = Description of Artificial Sequence: Synthetic peptide; note = ABTIM3-hum21[TIM-3] vhCDR2
DIYPGQGDTSYNQKFKG

SEQ ID NO: 37622 - protein, 9 aa, synthetic construct
  source 1..9: note = Description of Artificial Sequence: Synthetic peptide; note = ABTIM3-hum21[TIM-3] vhCDR3
VGGAFPMDY

SEQ ID NO: 37623 - protein, 111 aa, synthetic construct; identical to SEQ ID NO: 37607
  source 1..111: note = Description of Artificial Sequence: Synthetic polypeptide; note = ABTIM3-hum21[TIM-3] variable light Chain

SEQ ID NO: 37624 - protein, 15 aa, synthetic construct
  source 1..15: note = Description of Artificial Sequence: Synthetic peptide; note = ABTIM3-hum21[TIM-3] vlCDR1
RASESVEYYGTSLMQ

SEQ ID NO: 37625 - protein, 7 aa, synthetic construct
  source 1..7: note = Description of Artificial Sequence: Synthetic peptide; note = ABTIM3-hum21[TIM-3] vlCDR2
AASNVES

SEQ ID NO: 37626 - protein, 9 aa, synthetic construct
  source 1..9: note = Description of Artificial Sequence: Synthetic peptide; note = ABTIM3-hum21[TIM-3] vlCDR3
QQSRKDPST

SEQ ID NO: 37627 - protein, 121 aa, synthetic construct
  source 1..121: note = Description of Artificial Sequence: Synthetic polypeptide; note = 4177[TIM-3] variable heavy Chain
QVQLQESGPGLVKPSETLSLTCTVSGGSISSYYWSWIRQPPGKGLEWIGYIFHSGSTNYNPSLKSRVTISVDTSKNQFSLKLSSVTAADTAVYYCARDGEYFDMLTGFDYWGQGTLVTVSS

SEQ ID NO: 37628 - protein, 5 aa, synthetic construct
  source 1..5: note = Description of Artificial Sequence: Synthetic peptide; note = 4177[TIM-3] vhCDR1
SYYWS

SEQ ID NO: 37629 - protein, 16 aa, synthetic construct
  source 1..16: note = Description of Artificial Sequence: Synthetic peptide; note = 4177[TIM-3] vhCDR2
YIFHSGSTNYNPSLKS

SEQ ID NO: 37630 - protein, 13 aa, synthetic construct
  source 1..13: note = Description of Artificial Sequence: Synthetic peptide; note = 4177[TIM-3] vhCDR3
DGEYFDMLTGFDY

SEQ ID NO: 37631 - protein, 109 aa, synthetic construct
  source 1..109: note = Description of Artificial Sequence: Synthetic polypeptide; note = 4177[TIM-3] variable light Chain
RCDIQMTQSPSSLSASVGDRVTITCRASQGISSWLAWYQQKPEKAPKSLIYAASSLQSGVPSRFSGSGSGTDFTLTISSLQPEDFATYYCQQYNSYPRTFGQGTKVEIK

SEQ ID NO: 37632 - protein, 11 aa, synthetic construct
  source 1..11: note = Description of Artificial Sequence: Synthetic peptide; note = 4177[TIM-3] vlCDR1
RASQGISSWLA

SEQ ID NO: 37633 - protein, 7 aa, synthetic construct
  source 1..7: note = Description of Artificial Sequence: Synthetic peptide; note = 4177[TIM-3] vlCDR2
AASSLQS

SEQ ID NO: 37634 - protein, 9 aa, synthetic construct
  source 1..9: note = Description of Artificial Sequence: Synthetic peptide; note = 4177[TIM-3] vlCDR3
QQYNSYPRT

SEQ ID NO: 37635 - protein, 121 aa, synthetic construct
  source 1..121: note = Description of Artificial Sequence: Synthetic polypeptide; note = 4545[TIM-3] variable heavy Chain
QVQLQESGPGLVKPSETLSLTCTVSGGSFSRGGYYWNWIRQPPGKGLEWIGYIYYSGSTNYNPSLKSRVTISLDTSKNQFSLKLSSVTAADTAVYYCARDHYSSSWTFDYWGQGTLVTVSS

SEQ ID NO: 37636 - protein, 7 aa, synthetic construct
  source 1..7: note = Description of Artificial Sequence: Synthetic peptide; note = 4545[TIM-3] vhCDR1
RGGYYWN

SEQ ID NO: 37637 - protein, 16 aa, synthetic construct
  source 1..16: note = Description of Artificial Sequence: Synthetic peptide; note = 4545[TIM-3] vhCDR2
YIYYSGSTNYNPSLKS

SEQ ID NO: 37638 - protein, 11 aa, synthetic construct
  source 1..11: note = Description of Artificial Sequence: Synthetic peptide; note = 4545[TIM-3] vhCDR3
DHYSSSWTFDY

SEQ ID NO: 37639 - protein, 107 aa, synthetic construct
  source 1..107: note = Description of Artificial Sequence: Synthetic polypeptide; note = 4545[TIM-3] variable light Chain
EIVLTQSPATLSLSPGERATLSCRASQSVSSYLAWYQQKPGQAPRLLIYDASNRATGIPARFSGSGSGTDFTLTISSLEPEDFAVYYCQQRSNWPPTFGQGTKLEIK

SEQ ID NO: 37640 - protein, 11 aa, synthetic construct
  source 1..11: note = Description of Artificial Sequence: Synthetic peptide; note = 4545[TIM-3] vlCDR1
RASQSVSSYLA

SEQ ID NO: 37641 - protein, 7 aa, synthetic construct
  source 1..7: note = Description of Artificial Sequence: Synthetic peptide; note = 4545[TIM-3] vlCDR2
DASNRAT

SEQ ID NO: 37642 - protein, 9 aa, synthetic construct
  source 1..9: note = Description of Artificial Sequence: Synthetic peptide; note = 4545[TIM-3] vlCDR3
QQRSNWPPT

SEQ ID NO: 37643 - protein, 117 aa, synthetic construct; identical to SEQ ID NO: 20766
  source 1..117: note = Description of Artificial Sequence: Synthetic polypeptide; note = 8213[TIM-3] variable heavy Chain

SEQ ID NO: 37644 - protein, 5 aa, synthetic construct
  source 1..5: note = Description of Artificial Sequence: Synthetic peptide; note = 8213[TIM-3] vhCDR1
SYWMH

SEQ ID NO: 37645 - protein, 17 aa, synthetic construct
  source 1..17: note = Description of Artificial Sequence: Synthetic peptide; note = 8213[TIM-3] vhCDR2
EINPSNGRTNYNEKFKT

SEQ ID NO: 37646 - protein, 8 aa, synthetic construct
  source 1..8: note = Description of Artificial Sequence: Synthetic peptide; note = 8213[TIM-3] vhCDR3
GYYLYFDY

SEQ ID NO: 37647 - protein, 107 aa, synthetic construct; identical to SEQ ID NO: 20771
  source 1..107: note = Description of Artificial Sequence: Synthetic polypeptide; note = 8213[TIM-3] variable light Chain

SEQ ID NO: 37648 - protein, 11 aa, synthetic construct
  source 1..11: note = Description of Artificial Sequence: Synthetic peptide; note = 8213[TIM-3] vlCDR1
HASQGIRINIG

SEQ ID NO: 37649 - protein, 7 aa, synthetic construct
  source 1..7: note = Description of Artificial Sequence: Synthetic peptide; note = 8213[TIM-3] vlCDR2
HGTNLED

SEQ ID NO: 37650 - protein, 9 aa, synthetic construct
  source 1..9: note = Description of Artificial Sequence: Synthetic peptide; note = 8213[TIM-3] vlCDR3
VQYGQFPWT

SEQ ID NO: 37651 - protein, 117 aa, synthetic construct
  source 1..117: note = Description of Artificial Sequence: Synthetic polypeptide; note = mAb15[TIM-3] variable heavy Chain
QVQLKESGPGLVAPSQSLSITCTVSGFSLTGYGVTWVRQPPGKGLEWLGMIWGDGNTDYNSGLKSRLNISKDNSKSQVFLKMNSLQTDDTARYYCARSYYYGPPDYWGQGTTLTVSS

SEQ ID NO: 37652 - protein, 5 aa, synthetic construct
  source 1..5: note = Description of Artificial Sequence: Synthetic peptide; note = mAb15[TIM-3] vhCDR1
GYGVT

SEQ ID NO: 37653 - protein, 16 aa, synthetic construct
  source 1..16: note = Description of Artificial Sequence: Synthetic peptide; note = mAb15[TIM-3] vhCDR2
MIWGDGNTDYNSGLKS

SEQ ID NO: 37654 - protein, 9 aa, synthetic construct
  source 1..9: note = Description of Artificial Sequence: Synthetic peptide; note = mAb15[TIM-3] vhCDR3
SYYYGPPDY

SEQ ID NO: 37655 - protein, 113 aa, synthetic construct
  source 1..113: note = Description of Artificial Sequence: Synthetic polypeptide; note = mAb15[TIM-3] variable light Chain
DIVMTQSPSSLAMSVGQKVTMSCKSSQSLLNSRSQKNYLAWYQRKPGQSPKLLLYFASTRESGVPDRFIGSGSGTDFTLTISSVQAEDLADYFCHQHYNTPYTFGGGTKLEIK

SEQ ID NO: 37656 - protein, 17 aa, synthetic construct
  source 1..17: note = Description of Artificial Sequence: Synthetic peptide; note = mAb15[TIM-3] vlCDR1
KSSQSLLNSRSQKNYLA

SEQ ID NO: 37657 - protein, 7 aa, synthetic construct
  source 1..7: note = Description of Artificial Sequence: Synthetic peptide; note = mAb15[TIM-3] vlCDR2
FASTRES

SEQ ID NO: 37658 - protein, 9 aa, synthetic construct
  source 1..9: note = Description of Artificial Sequence: Synthetic peptide; note = mAb15[TIM-3] vlCDR3
HQHYNTPYT

SEQ ID NO: 37659 - protein, 121 aa, synthetic construct
  source 1..121: note = Description of Artificial Sequence: Synthetic polypeptide; note = mAb58[TIM-3] variable heavy Chain
QIQLVQSGPELKKPGETVKISCKASGYTFTTYGMSWVKQAPGKGLKLMGWINTYSGAPTYADDFKGRFAFSLETSASAAYLQINNLKNEDTATYFCARKPPHYYVNSFDYWGQGTTLTVSS

SEQ ID NO: 37660 - protein, 5 aa, synthetic construct
  source 1..5: note = Description of Artificial Sequence: Synthetic peptide; note = mAb58[TIM-3] vhCDR1
TYGMS

SEQ ID NO: 37661 - protein, 17 aa, synthetic construct
  source 1..17: note = Description of Artificial Sequence: Synthetic peptide; note = mAb58[TIM-3] vhCDR2
WINTYSGAPTYADDFKG

SEQ ID NO: 37662 - protein, 12 aa, synthetic construct
  source 1..12: note = Description of Artificial Sequence: Synthetic peptide; note = mAb58[TIM-3] vhCDR3
KPPHYYVNSFDY

SEQ ID NO: 37663 - protein, 107 aa, synthetic construct
  source 1..107: note = Description of Artificial Sequence: Synthetic polypeptide; note = mAb58[TIM-3] variable light Chain
DIVMTQSPATLSVTPGDRVSLSCRASQSISDYLHWYQQKSHESPRLLIKYASQSISGIPSRFSGSGSGSDFTLSINSVEPEDVGVYYCQNGHSFPYTFGGGTKLEIK

SEQ ID NO: 37664 - protein, 11 aa, synthetic construct
  source 1..11: note = Description of Artificial Sequence: Synthetic peptide; note = mAb58[TIM-3] vlCDR1
RASQSISDYLH

SEQ ID NO: 37665 - protein, 7 aa, synthetic construct
  source 1..7: note = Description of Artificial Sequence: Synthetic peptide; note = mAb58[TIM-3] vlCDR2
YASQSIS

SEQ ID NO: 37666 - protein, 9 aa, synthetic construct
  source 1..9: note = Description of Artificial Sequence: Synthetic peptide; note = mAb58[TIM-3] vlCDR3
QNGHSFPYT

SEQ ID NO: 37667 - protein, 120 aa, synthetic construct
  source 1..120: note = Description of Artificial Sequence: Synthetic polypeptide; note = TIM3-0433[TIM-3] variable heavy Chain
QITLKESGPTLVKPTQTLTLTCTFSGFSLSTSGMSVGWIRQPPGKGLEWLAHIWLNDDVFFNPALKSRLTITKDTSKNQVVLTMTNMDPVDTATYYCVRANGYLYALDYWGQGTLVTVSS

SEQ ID NO: 37668 - protein, 7 aa, synthetic construct
  source 1..7: note = Description of Artificial Sequence: Synthetic peptide; note = TIM3-0433[TIM-3] vhCDR1
TSGMSVG

SEQ ID NO: 37669 - protein, 16 aa, synthetic construct
  source 1..16: note = Description of Artificial Sequence: Synthetic peptide; note = TIM3-0433[TIM-3] vhCDR2
HIWLNDDVFFNPALKS

SEQ ID NO: 37670 - protein, 10 aa, synthetic construct
  source 1..10: note = Description of Artificial Sequence: Synthetic peptide; note = TIM3-0433[TIM-3] vhCDR3
ANGYLYALDY

SEQ ID NO: 37671 - protein, 106 aa, synthetic construct
  source 1..106: note = Description of Artificial Sequence: Synthetic polypeptide; note = TIM3-0433[TIM-3] variable light Chain
ETTLTQSPAFMSATPGDKVNIACSASSSVSYTQWYQQKPGEAPKLWIYDAFKLAPGIPPRFSGSGYGTDFTLTINNIESEDAAYYFCHQWSSYPWTFGQGTKLEIK

SEQ ID NO: 37672 - protein, 10 aa, synthetic construct
  source 1..10: note = Description of Artificial Sequence: Synthetic peptide; note = TIM3-0433[TIM-3] vlCDR1
SASSSVSYTQ

SEQ ID NO: 37673 - protein, 7 aa, synthetic construct
  source 1..7: note = Description of Artificial Sequence: Synthetic peptide; note = TIM3-0433[TIM-3] vlCDR2
DAFKLAP

SEQ ID NO: 37674 - protein, 9 aa, synthetic construct
  source 1..9: note = Description of Artificial Sequence: Synthetic peptide; note = TIM3-0433[TIM-3] vlCDR3
HQWSSYPWT

SEQ ID NO: 37675 - protein, 120 aa, synthetic construct; identical to SEQ ID NO: 37667
  source 1..120: note = Description of Artificial Sequence: Synthetic polypeptide; note = TIM3-0434[TIM-3] variable heavy Chain

SEQ ID NO: 37676 - protein, 7 aa, synthetic construct
  source 1..7: note = Description of Artificial Sequence: Synthetic peptide; note = TIM3-0434[TIM-3] vhCDR1
TSGMSVG

SEQ ID NO: 37677 - protein, 16 aa, synthetic construct
  source 1..16: note = Description of Artificial Sequence: Synthetic peptide; note = TIM3-0434[TIM-3] vhCDR2
HIWLNDDVFFNPALKS

SEQ ID NO: 37678 - protein, 10 aa, synthetic construct
  source 1..10: note = Description of Artificial Sequence: Synthetic peptide; note = TIM3-0434[TIM-3] vhCDR3
ANGYLYALDY

SEQ ID NO: 37679 - protein, 106 aa, synthetic construct
  source 1..106: note = Description of Artificial Sequence: Synthetic polypeptide; note = TIM3-0434[TIM-3] variable light Chain
DIQLTQSPSFLSASVGDRVTITCSASSSVSYTQWYQQKPGKAPKLWIYDAFKLAPGVPSRFSGSGSGTEFTLTISSLQPEDFATYFCHQWSSYPWTFGQGTKLEIK

SEQ ID NO: 37680 - protein, 10 aa, synthetic construct
  source 1..10: note = Description of Artificial Sequence: Synthetic peptide; note = TIM3-0434[TIM-3] vlCDR1
SASSSVSYTQ

SEQ ID NO: 37681 - protein, 7 aa, synthetic construct
  source 1..7: note = Description of Artificial Sequence: Synthetic peptide; note = TIM3-0434[TIM-3] vlCDR2
DAFKLAP

SEQ ID NO: 37682 - protein, 9 aa, synthetic construct
  source 1..9: note = Description of Artificial Sequence: Synthetic peptide; note = TIM3-0434[TIM-3] vlCDR3
HQWSSYPWT

SEQ ID NO: 37683 - protein, 119 aa, synthetic construct
  source 1..119: note = Description of Artificial Sequence: Synthetic polypeptide; note = TIM3-0438[TIM-3] variable heavy Chain
EVQLVESGGGLVQPGGSLRLSCAASGFNIKTTYMHWVRQAPGKGLEWVGRIDPADDNTKYAPKFQGKATISADTSKNTAYLQMNSLRAEDTAVYYCVRDFGYVAWFAYWGQGTLVTVSS

SEQ ID NO: 37684 - protein, 5 aa, synthetic construct
  source 1..5: note = Description of Artificial Sequence: Synthetic peptide; note = TIM3-0438[TIM-3] vhCDR1
TTYMH

SEQ ID NO: 37685 - protein, 17 aa, synthetic construct
  source 1..17: note = Description of Artificial Sequence: Synthetic peptide; note = TIM3-0438[TIM-3] vhCDR2
RIDPADDNTKYAPKFQG

SEQ ID NO: 37686 - protein, 10 aa, synthetic construct
  source 1..10: note = Description of Artificial Sequence: Synthetic peptide; note = TIM3-0438[TIM-3] vhCDR3
DFGYVAWFAY

SEQ ID NO: 37687 - protein, 107 aa, synthetic construct
  source 1..107: note = Description of Artificial Sequence: Synthetic polypeptide; note = TIM3-0438[TIM-3] variable light Chain
DIVMTQSPLSLPVTPGEPASISCRASQSVDNYVAWYLQKPGQSPQLLIYYASNRYIGVPDRFSGSGSGTDFTLKISRVEAEDVGVYYCQQHYSSPYTFGQGTKVEIK

SEQ ID NO: 37688 - protein, 11 aa, synthetic construct
  source 1..11: note = Description of Artificial Sequence: Synthetic peptide; note = TIM3-0438[TIM-3] vlCDR1
RASQSVDNYVA

SEQ ID NO: 37689 - protein, 7 aa, synthetic construct
  source 1..7: note = Description of Artificial Sequence: Synthetic peptide; note = TIM3-0438[TIM-3] vlCDR2
YASNRYI

SEQ ID NO: 37690 - protein, 9 aa, synthetic construct
  source 1..9: note = Description of Artificial Sequence: Synthetic peptide; note = TIM3-0438[TIM-3] vlCDR3
QQHYSSPYT

SEQ ID NO: 37691 - protein, 119 aa, synthetic construct
  source 1..119: note = Description of Artificial Sequence: Synthetic polypeptide; note = TIM3-0443[TIM-3] variable heavy Chain
EVQLVESGGGLVQPGGSLRLSCAASGFNIKTTYMHWVRQAPGKGLEWVGRIDPADDNTKYAPKFQGKATISADTSKNTAYLQMNSLRAEDTAVYYCVRDFGYVAWFAYWGQGTLVTFSS

SEQ ID NO: 37692 - protein, 5 aa, synthetic construct
  source 1..5: note = Description of Artificial Sequence: Synthetic peptide; note = TIM3-0443[TIM-3] vhCDR1
TTYMH

SEQ ID NO: 37693 - protein, 17 aa, synthetic construct
  source 1..17: note = Description of Artificial Sequence: Synthetic peptide; note = TIM3-0443[TIM-3] vhCDR2
RIDPADDNTKYAPKFQG

SEQ ID NO: 37694 - protein, 10 aa, synthetic construct
  source 1..10: note = Description of Artificial Sequence: Synthetic peptide; note = TIM3-0443[TIM-3] vhCDR3
DFGYVAWFAY

SEQ ID NO: 37695 - protein, 107 aa, synthetic construct; identical to SEQ ID NO: 37687
  source 1..107: note = Description of Artificial Sequence: Synthetic polypeptide; note = TIM3-0443[TIM-3] variable light Chain

SEQ ID NO: 37696 - protein, 11 aa, synthetic construct
  source 1..11: note = Description of Artificial Sequence: Synthetic peptide; note = TIM3-0443[TIM-3] vlCDR1
RASQSVDNYVA

SEQ ID NO: 37697 - protein, 7 aa, synthetic construct
  source 1..7: note = Description of Artificial Sequence: Synthetic peptide; note = TIM3-0443[TIM-3] vlCDR2
YASNRYI

SEQ ID NO: 37698 - protein, 9 aa, synthetic construct
  source 1..9: note = Description of Artificial Sequence: Synthetic peptide; note = TIM3-0443[TIM-3] vlCDR3
QQHYSSPYT

SEQ ID NO: 37699 - protein, 15 aa, synthetic construct
  source 1..15: note = Description of Artificial Sequence: Synthetic peptide
GGGGSGGGGSGGGGS

SEQ ID NO: 37700 - protein, 18 aa, synthetic construct
  source 1..18: note = Description of Artificial Sequence: Synthetic peptide
GSTSGSGKPGSGEGSTKG

SEQ ID NO: 37701 - protein, 14 aa, synthetic construct
  source 1..14: note = Description of Artificial Sequence: Synthetic peptide
IRPRAIGGSKPRVA

SEQ ID NO: 37702 - protein, 15 aa, synthetic construct
  source 1..15: note = Description of Artificial Sequence: Synthetic peptide
GKGGSGKGGSGKGGS

SEQ ID NO: 37703 - protein, 15 aa, synthetic construct
  source 1..15: note = Description of Artificial Sequence: Synthetic peptide
GGKGSGGKGSGGKGS

SEQ ID NO: 37704 - protein, 15 aa, synthetic construct
  source 1..15: note = Description of Artificial Sequence: Synthetic peptide
GGGKSGGGKSGGGKS

SEQ ID NO: 37705 - protein, 15 aa, synthetic construct
  source 1..15: note = Description of Artificial Sequence: Synthetic peptide
GKGKSGKGKSGKGKS

SEQ ID NO: 37706 - protein, 15 aa, synthetic construct
  source 1..15: note = Description of Artificial Sequence: Synthetic peptide
GGGKSGGKGSGKGGS

SEQ ID NO: 37707 - protein, 15 aa, synthetic construct
  source 1..15: note = Description of Artificial Sequence: Synthetic peptide
GKPGSGKPGSGKPGS

SEQ ID NO: 37708 - protein, 20 aa, synthetic construct
  source 1..20: note = Description of Artificial Sequence: Synthetic peptide
GKPGSGKPGSGKPGSGKPGS

SEQ ID NO: 37709 - protein, 20 aa, synthetic construct
  source 1..20: note = Description of Artificial Sequence: Synthetic peptide
GKGKSGKGKSGKGKSGKGKS

SEQ ID NO: 37710 - protein, 20 aa, synthetic construct
  source 1..20: note = Description of Artificial Sequence: Synthetic peptide
GGGGSGGGGSGGGGSGGGGS

SEQ ID NO: 37711 - protein, 14 aa, synthetic construct
  source 1..14: note = Description of Artificial Sequence: Synthetic peptide
STAGDTHLGGEDFD

SEQ ID NO: 37712 - protein, 15 aa, synthetic construct
  source 1..15: note = Description of Artificial Sequence: Synthetic peptide
GEGGSGEGGSGEGGS

SEQ ID NO: 37713 - protein, 15 aa, synthetic construct
  source 1..15: note = Description of Artificial Sequence: Synthetic peptide
GGEGSGGEGSGGEGS

SEQ ID NO: 37714 - protein, 15 aa, synthetic construct
  source 1..15: note = Description of Artificial Sequence: Synthetic peptide
GGGESGGGESGGGES

SEQ ID NO: 37715 - protein, 15 aa, synthetic construct
  source 1..15: note = Description of Artificial Sequence: Synthetic peptide
GEGESGEGESGEGES

SEQ ID NO: 37716 - protein, 15 aa, synthetic construct
  source 1..15: note = Description of Artificial Sequence: Synthetic peptide
GGGESGGEGSGEGGS

SEQ ID NO: 37717 - protein, 20 aa, synthetic construct
  source 1..20: note = Description of Artificial Sequence: Synthetic peptide
GEGESGEGESGEGESGEGES

SEQ ID NO: 37718 - protein, 15 aa, synthetic construct
  source 1..15: note = Description of Artificial Sequence: Synthetic peptide
GGGGSGGGGSGGGGS

SEQ ID NO: 37719 - protein, 20 aa, synthetic construct
  source 1..20: note = Description of Artificial Sequence: Synthetic peptide
GGGGSGGGGSGGGGSGGGGS

SEQ ID NO: 37720 - protein, 18 aa, synthetic construct
  source 1..18: note = Description of Artificial Sequence: Synthetic peptide
GSTSGSGKPGSGEGSTKG

SEQ ID NO: 37721 - protein, 19 aa, synthetic construct
  source 1..19: note = Description of Artificial Sequence: Synthetic peptide
PRGASKSGSASQTGSAPGS

SEQ ID NO: 37722 - protein, 19 aa, synthetic construct
  source 1..19: note = Description of Artificial Sequence: Synthetic peptide
GTAAAGAGAAGGAAAGAAG

SEQ ID NO: 37723 - protein, 19 aa, synthetic construct
  source 1..19: note = Description of Artificial Sequence: Synthetic peptide
GTSGSSGSGSGGSGSGGGG

SEQ ID NO: 37724 - protein, 20 aa, synthetic construct
  source 1..20: note = Description of Artificial Sequence: Synthetic peptide
GKPGSGKPGSGKPGSGKPGS

SEQ ID NO: 37725 - protein, 329 aa, synthetic construct
  source 1..329: note = Description of Artificial Sequence: Synthetic polypeptide
ASTKGPSVFPLAPSSKSTSGGTAALGCLVKDYFPEPVTVSWNSGALTSGVHTFPAVLQSSGLYSLSSVVTVPSSSLGTQTYICNVNHKPSDTKVDKKVEPKSCDKTHTCPPCPAPPVAGPSVFLFPPKPKDTLMISRTPEVTCVVVDVKHEDPEVKFNWYVDGVEVHNAKTKPREEEYNSTYRVVSVLTVLHQDWLNGKEYKCKVSNKALPAPIEKTISKAKGQPREPQVYTLPPSREEMTKNQVSLTCDVSGFYPSDIAVEWESDGQPENNYKTTPPVLDSDGSFFLYSKLTVDKSRWEQGDVFSCSVMHEALHNHYTQKSLSLSPGK

SEQ ID NO: 37726 - protein, 231 aa, synthetic construct; identical to SEQ ID NO: 21532
  source 1..231: note = Description of Artificial Sequence: Synthetic polypeptide

SEQ ID NO: 37727 - protein, 107 aa, synthetic construct [sequence omitted]

SEQ ID NO: 37728 - protein, 329 aa, synthetic construct; identical to SEQ ID NO: 37725
  source 1..329: note = Description of Artificial Sequence: Synthetic polypeptide

SEQ ID NO: 37729 - protein, 231 aa, synthetic construct
  source 1..231: note = Description of Artificial Sequence: Synthetic polypeptide
EPKSSDKTHTCPPCPAPPVAGPSVFLFPPKPKDTLMISRTPEVTCVVVDVKHEDPEVKFNWYVDGVEVHNAKTKPREEQYNSTYRVVSVLTVLHQDWLNGKEYKCKVSNKALPAPIEKTISKAKGQPREPQVYTLPPSREEMTKNQVKLTCLVKGFYPSDIAVEWESNGQPENNYKTTPPVLDSDGSFFLYSKLTVDKSRWQQGNVFSCSVMHEALHNHYTQKSLSLSPGK

SEQ ID NO: 37730 - protein, 107 aa, synthetic construct [sequence omitted]

SEQ ID NO: 37731 - protein, 329 aa, synthetic construct
  source 1..329: note = Description of Artificial Sequence: Synthetic polypeptide
ASTKGPSVFPLAPSSKSTSGGTAALGCLVKDYFPEPVTVSWNSGALTSGVHTFPAVLQSSGLYSLSSVVTVPSSSLGTQTYICNVNHKPSDTKVDKKVEPKSCDKTHTCPPCPAPPVAGPSVFLFPPKPKDTLMISRTPEVTCVVVDVKHEDPEVKFNWYVDGVEVHNAKTKPREEEYNSTYRVVSVLTVLHQDWLNGKEYKCKVSNKALPAPIEKTISKAKGQPREPQVYTLPPSREEMTKNQVSLTCEVSGFYPSDIAVEWESDGQPENNYKTTPPVLDSDGSFFLYSKLTVDKSRWEQGDVFSCSVMHEALHNHYTQKSLSLSPGK

SEQ ID NO: 37732 - protein, 231 aa, synthetic construct; identical to SEQ ID NO: 37729
  source 1..231: note = Description of Artificial Sequence: Synthetic polypeptide

SEQ ID NO: 37733 - protein, 107 aa, synthetic construct [sequence omitted]

SEQ ID NO: 37734 - protein, 330 aa, synthetic construct
  source 1..330: note = Description of Artificial Sequence: Synthetic polypeptide
ASTKGPSVFPLAPSSKSTSGGTAALGCLVKDYFPEPVTVSWNSGALTSGVHTFPAVLQSSGLYSLSSVVTVPSSSLGTQTYICNVNHKPSDTKVDKKVEPKSCDKTHTCPPCPAPPVAGPSVFLFPPKPKDTLMISRTPEVTCVVVDVKHEDPEVKFNWYVDGVEVHNAKTKPREEEYNSTYRVVSVLTVLHQDWLNGKEYKCKVSNKALPAPIEKTISKAKGQPREPQVYTLPPSREEMTENEVSLTCLVKSGFYPSDIAVEWESDGQPENNYKTTPPVLDSDGSFFLYSKLEVDKSRWEQGDVFSCSVMHEALHNHYTQKSLSLSPGK

SEQ ID NO: 37735 - protein, 231 aa, synthetic construct
  source 1..231: note = Description of Artificial Sequence: Synthetic polypeptide
EPKSSDKTHTCPPCPAPPVAGPSVFLFPPKPKDTLMISRTPEVTCVVVDVKHEDPEVKFNWYVDGVEVHNAKTKPREEQYNSTYRVVSVLTVLHQDWLNGKEYKCKVSNKALPAPIEKTISKAKGQPREPQVYTLPPSREEMTKNQVSLTCLVKGFYPSDIAVEWESNGQPENNYKTTPPVLDSKGSFFLYSKLTVDKSRWQQGNVFSCSVMHEALHNHYTQKSLSLSPGK

SEQ ID NO: 37736 - protein, 107 aa, synthetic construct [sequence omitted]

SEQ ID NO: 37737 - protein, 329 aa, synthetic construct; identical to SEQ ID NO: 37725
  source 1..329: note = Description of Artificial Sequence: Synthetic polypeptide

SEQ ID NO: 37738 - protein, 329 aa, synthetic construct
  source 1..329: note = Description of Artificial Sequence: Synthetic polypeptide
ASTKGPSVFPLAPSSKSTSGGTAALGCLVKDYFPEPVTVSWNSGALTSGVHTFPAVLQSSGLYSLSSVVTVPSSSLGTQTYICNVNHKPSDTKVDKKVEPKSSDKTHTCPPCPAPPVAGPSVFLFPPKPKDTLMISRTPEVTCVVVDVKHEDPEVKFNWYVDGVEVHNAKTKPREEQYNSTYRVVSVLTVLHQDWLNGKEYKCKVSNKALPAPIEKTISKAKGQPREPQVYTLPPSREQMTKNQVKLTCLVKGFYPSDIAVEWESNGQPENNYKTTPPVLDSDGSFFLYSKLTVDKSRWQQGNVFSCSVMHEALHNHYTQKSLSLSPGK

SEQ ID NO: 37739 - protein, 107 aa, synthetic construct [sequence omitted]

SEQ ID NO: 37740 - protein, 329 aa, synthetic construct; identical to SEQ ID NO: 37725
  source 1..329: note = Description of Artificial Sequence: Synthetic polypeptide

SEQ ID NO: 37741 - protein, 231 aa, synthetic construct; identical to SEQ ID NO: 21532
  source 1..231: note = Description of Artificial Sequence: Synthetic polypeptide

SEQ ID NO: 37742 - protein, 107 aa, synthetic construct [sequence omitted]

SEQ ID NO: 37743 - protein, 329 aa, synthetic construct; identical to SEQ ID NO: 37725
  source 1..329: note = Description of Artificial Sequence: Synthetic polypeptide

SEQ ID NO: 37744 - protein, 231 aa, synthetic construct; identical to SEQ ID NO: 37729
  source 1..231: note = Description of Artificial Sequence: Synthetic polypeptide

SEQ ID NO: 37745 - protein, 107 aa, synthetic construct [sequence omitted]

SEQ ID NO: 37746 - protein, 329 aa, synthetic construct; identical to SEQ ID NO: 37731
  source 1..329: note = Description of Artificial Sequence: Synthetic polypeptide

SEQ ID NO: 37747 - protein, 231 aa, synthetic construct; identical to SEQ ID NO: 37729
  source 1..231: note = Description of Artificial Sequence: Synthetic polypeptide

SEQ ID NO: 37748 - protein, 107 aa, synthetic construct [sequence omitted]

SEQ ID NO: 37749 - protein, 330 aa, synthetic construct; identical to SEQ ID NO: 37734
  source 1..330: note = Description of Artificial Sequence: Synthetic polypeptide

SEQ ID NO: 37750 - protein, 231 aa, synthetic construct; identical to SEQ ID NO: 37735
  source 1..231: note = Description of Artificial Sequence: Synthetic polypeptide

SEQ ID NO: 37751 - protein, 107 aa, synthetic construct [sequence omitted]

SEQ ID NO: 37752 - protein, 329 aa, synthetic construct; identical to SEQ ID NO: 37725
  source 1..329: note = Description of Artificial Sequence: Synthetic polypeptide

SEQ ID NO: 37753 - protein, 329 aa, synthetic construct; identical to SEQ ID NO: 37738
  source 1..329: note = Description of Artificial Sequence: Synthetic polypeptide

SEQ ID NO: 37754 - protein, 107 aa, synthetic construct [sequence omitted]

SEQ ID NO: 37755 - protein, 20 aa, synthetic construct
  source 1..20: note = Description of Artificial Sequence: Synthetic peptide
GKPGSGKPGSGKPGSGKPGS

SEQ ID NO: 37756 - protein, 5 aa, synthetic construct
  source 1..5: note = Description of Artificial Sequence: Synthetic peptide
GSGGS

SEQ ID NO: 37757 - protein, 5 aa, synthetic construct
  source 1..5: note = Description of Artificial Sequence: Synthetic peptide
GGGGS

SEQ ID NO: 37758 - protein, 4 aa, synthetic construct
  source 1..4: note = Description of Artificial Sequence: Synthetic peptide
GGGS

SEQ ID NO: 37759 - protein, 122 aa, synthetic construct; identical to SEQ ID NO: 10908
  source 1..122: note = Description of Artificial Sequence: Synthetic polypeptide; note = VH of XENP19690

SEQ ID NO: 37760 - protein, 5 aa, synthetic construct
  source 1..5: note = Description of Artificial Sequence: Synthetic peptide; note = XENP19690 vhCDR1
NYWMN

SEQ ID NO: 37761 - protein, 19 aa, synthetic construct
  source 1..19: note = Description of Artificial Sequence: Synthetic peptide; note = XENP19690 vhCDR2
EIRLYSNNYATHYAESVKG

SEQ ID NO: 37762 - protein, 11 aa, synthetic construct
  source 1..11: note = Description of Artificial Sequence: Synthetic peptide; note = XENP19690 vhCDR3
YYGNYGGYFDV

SEQ ID NO: 37763 - protein, 107 aa, synthetic construct; identical to SEQ ID NO: 10999
  source 1..107: note = Description of Artificial Sequence: Synthetic polypeptide; note = VL of XENP19690

SEQ ID NO: 37764 - protein, 11 aa, synthetic construct
  source 1..11: note = Description of Artificial Sequence: Synthetic peptide; note = XENP19690 vlCDR1
RASQSVGNDVA

SEQ ID NO: 37765 - protein, 7 aa, synthetic construct
  source 1..7: note = Description of Artificial Sequence: Synthetic peptide; note = XENP19690 vlCDR2
YASHRYT

SEQ ID NO: 37766 - protein, 9 aa, synthetic construct
  source 1..9: note = Description of Artificial Sequence: Synthetic peptide; note = XENP19690 vlCDR3
QQDFSSPRT

SEQ ID NO: 37767 - protein, 249 aa, synthetic construct; identical to SEQ ID NO: 11375
  source 1..249: note = Description of Artificial Sequence: Synthetic polypeptide; note = scFV of XENP19690

SEQ ID NO: 37768 - protein, 122 aa, synthetic construct; identical to SEQ ID NO: 10917
  source 1..122: note = Description of Artificial Sequence: Synthetic polypeptide; note = VH of XENP21215

SEQ ID NO: 37769 - protein, 5 aa, synthetic construct
  source 1..5: note = Description of Artificial Sequence: Synthetic peptide; note = XENP21215 vhCDR1
NYWMN

SEQ ID NO: 37770 - protein, 19 aa, synthetic construct
  source 1..19: note = Description of Artificial Sequence: Synthetic peptide; note = XENP21215 vhCDR2
EIRLYSNNYATHYAESVKG

SEQ ID NO: 37771 - protein, 11 aa, synthetic construct
  source 1..11: note = Description of Artificial Sequence: Synthetic peptide; note = XENP21215 vhCDR3
YYGNYGGYFDV

SEQ ID NO: 37772 - protein, 107 aa, synthetic construct; identical to SEQ ID NO: 22811
  source 1..107: note = Description of Artificial Sequence: Synthetic polypeptide; note = VL of XENP21215

SEQ ID NO: 37773 - protein, 11 aa, synthetic construct
  source 1..11: note = Description of Artificial Sequence: Synthetic peptide; note = XENP21215 vlCDR1
RASQSVGNDVA

SEQ ID NO: 37774 - protein, 7 aa, synthetic construct
  source 1..7: note = Description of Artificial Sequence: Synthetic peptide; note = XENP21215 vlCDR2
YASHRYT

SEQ ID NO: 37775 - protein, 9 aa, synthetic construct
  source 1..9: note = Description of Artificial Sequence: Synthetic peptide; note = XENP21215 vlCDR3
QQDWSSPRT

SEQ ID NO: 37776 - protein, 249 aa, synthetic construct
  source 1..249: note = Description of Artificial Sequence: Synthetic polypeptide; note = scFV of XENP21215
EVQLVESGGGLVKPGGSLRLTCVASGFTFSNYWMNWVRQAPGKGLEWVAEIRLYSNNYATHYAESVKGRFTISRDDSKSTLYLQMNNLKTEDTGVYYCTRYYGNYGGYFDVWGRGTLVTVSSGKPGSGKPGSGKPGSGKPGSEIVLTQSPATLSVSPGERVTLTCRASQSVGNDVAWYQQKPGQAPRLLINYASHRYTSVPDRFTGSGYGTEFTLTISSVQSEDFAVYYCQQDWSSPRTFGGGTKVEIK

SEQ ID NO: 37777 - protein, 107 aa, synthetic construct; identical to SEQ ID NO: 10999
  source 1..107: note = Description of Artificial Sequence: Synthetic polypeptide; note = VH of XENP19692

SEQ ID NO: 37778 - protein, 11 aa, synthetic construct
  source 1..11: note = Description of Artificial Sequence: Synthetic peptide; note = XENP19692 vhCDR1
RASQSVGNDVA

SEQ ID NO: 37779 - protein, 7 aa, synthetic construct
  source 1..7: note = Description of Artificial Sequence: Synthetic peptide; note = XENP19692 vhCDR2
YASHRYT

SEQ ID NO: 37780 - protein, 9 aa, synthetic construct
  source 1..9: note = Description of Artificial Sequence: Synthetic peptide; note = XENP19692 vhCDR3
QQDFSSPRT

SEQ ID NO: 37781 - protein, 122 aa, synthetic construct; identical to SEQ ID NO: 10908
  source 1..122: note = Description of Artificial Sequence: Synthetic polypeptide; note = VL of XENP19692

SEQ ID NO: 37782 - protein, 5 aa, synthetic construct
  source 1..5: note = Description of Artificial Sequence: Synthetic peptide; note = XENP19692 vlCDR1
NYWMN

SEQ ID NO: 37783 - protein, 19 aa, synthetic construct
  source 1..19: note = Description of Artificial Sequence: Synthetic peptide; note = XENP19692 vlCDR2
EIRLYSNNYATHYAESVKG

SEQ ID NO: 37784 - protein, 11 aa, synthetic construct
  source 1..11: note = Description of Artificial Sequence: Synthetic peptide; note = XENP19692 vlCDR3
YYGNYGGYFDV

SEQ ID NO: 37785 - protein, 249 aa, synthetic construct; identical to SEQ ID NO: 11393
  source 1..249: note = Description of Artificial Sequence: Synthetic polypeptide; note = scFV of XENP19692

SEQ ID NO: 37786 - protein, 107 aa, synthetic construct; identical to SEQ ID NO: 11359
  source 1..107: note = Description of Artificial Sequence: Synthetic polypeptide; note = VH of XENP19669

SEQ ID NO: 37787 - protein, 11 aa, synthetic construct
  source 1..11: note = Description of Artificial Sequence: Synthetic peptide; note = XENP19669 vhCDR1
RASQSVGNDVA

SEQ ID NO: 37788 - protein, 7 aa, synthetic construct
  source 1..7: note = Description of Artificial Sequence: Synthetic peptide; note = XENP19669 vhCDR2
YASHRYT

SEQ ID NO: 37789 - protein, 9 aa, synthetic construct
  source 1..9: note = Description of Artificial Sequence: Synthetic peptide; note = XENP19669 vhCDR3
QQDFSSPRT

SEQ ID NO: 37790 - protein, 122 aa, synthetic construct; identical to SEQ ID NO: 11358
  source 1..122: note = Description of Artificial Sequence: Synthetic polypeptide; note = VL of XENP19669

SEQ ID NO: 37791 - protein, 5 aa, synthetic construct
  source 1..5: note = Description of Artificial Sequence: Synthetic peptide; note = XENP19669 vlCDR1
NYWMN

SEQ ID NO: 37792 - protein, 19 aa, synthetic construct
  source 1..19: note = Description of Artificial Sequence: Synthetic peptide; note = XENP19669 vlCDR2
EIRLYSNNYATHYAESVKG

SEQ ID NO: 37793 - protein, 11 aa, synthetic construct
  source 1..11: note = Description of Artificial Sequence: Synthetic peptide; note = XENP19669 vlCDR3
YYGNYGGYFDV

SEQ ID NO: 37794 - protein, 249 aa, synthetic construct; identical to SEQ ID NO: 11366
  source 1..249: note = Description of Artificial Sequence: Synthetic polypeptide; note = scFV of XENP19669

SEQ ID NO: 37795 - protein, 120 aa, synthetic construct; identical to SEQ ID NO: 11412
  source 1..120: note = Description of Artificial Sequence: Synthetic polypeptide; note = VH of XENP20162

SEQ ID NO: 37796 - protein, 5 aa, synthetic construct
  source 1..5: note = Description of Artificial Sequence: Synthetic peptide; note = XENP20162 vhCDR1
NYWLG

SEQ ID NO: 37797 - protein, 17 aa, synthetic construct
  source 1..17: note = Description of Artificial Sequence: Synthetic peptide; note = XENP20162 vhCDR2
NFYPGSSNTYYNEKFQG

SEQ ID NO: 37798 - protein, 11 aa, synthetic construct
  source 1..11: note = Description of Artificial Sequence: Synthetic peptide; note = XENP20162 vhCDR3
HYGTNYRYFDV

SEQ ID NO: 37799 - protein, 107 aa, synthetic construct; identical to SEQ ID NO: 11413
  source 1..107: note = Description of Artificial Sequence: Synthetic polypeptide; note = VL of XENP20162

SEQ ID NO: 37800 - protein, 11 aa, synthetic construct
  source 1..11: note = Description of Artificial Sequence: Synthetic peptide; note = XENP20162 vlCDR1
RASQSVSNDVA

SEQ ID NO: 37801 - protein, 7 aa, synthetic construct
  source 1..7: note = Description of Artificial Sequence: Synthetic peptide; note = XENP20162 vlCDR2
YASNRYT

SEQ ID NO: 37802 - protein, 9 aa, synthetic construct
  source 1..9: note = Description of Artificial Sequence: Synthetic peptide; note = XENP20162 vlCDR3
QQDYSSPYT

SEQ ID NO: 37803 - protein, 247 aa, synthetic construct; identical to SEQ ID NO: 11411
  source 1..247: note = Description of Artificial Sequence: Synthetic polypeptide; note = scFV of XENP20162

SEQ ID NO: 37804 - protein, 118 aa, synthetic construct; identical to SEQ ID NO: 409
  source 1..118: note = Description of Artificial Sequence: Synthetic polypeptide; note = VH of [CTLA-4]_H0.25_L0 Anti-CTLA-4 Fv sequences (XENP19235 Fab, XENP19769 scFv)

SEQ ID NO: 37805 - protein, 5 aa, synthetic construct
  source 1..5: note = Description of Artificial Sequence: Synthetic peptide; note = [CTLA-4]_H0.25_L0 Anti-CTLA-4 Fv sequences (XENP19235 Fab, XENP19769 scFv) vhCDR1
SYAMH

SEQ ID NO: 37806 - protein, 17 aa, synthetic construct
  source 1..17: note = Description of Artificial Sequence: Synthetic peptide; note = [CTLA-4]_H0.25_L0 Anti-CTLA-4 Fv sequences (XENP19235 Fab, XENP19769 scFv) vhCDR2
FISYDGNNKYYADSVKG

SEQ ID NO: 37807 - protein, 9 aa, synthetic construct
  source 1..9: note = Description of Artificial Sequence: Synthetic peptide; note = [CTLA-4]_H0.25_L0 Anti-CTLA-4 Fv sequences (XENP19235 Fab, XENP19769 scFv) vhCDR3
TGWLGPFDY

SEQ ID NO: 37808 - protein, 108 aa, synthetic construct; identical to SEQ ID NO: 23
  source 1..108: note = Description of Artificial Sequence: Synthetic polypeptide; note = VL of [CTLA-4]_H0.25_L0 Anti-CTLA-4 Fv sequences (XENP19235 Fab, XENP19769 scFv)

SEQ ID NO: 37809 - protein, 12 aa, synthetic construct
  source 1..12: note = Description of Artificial Sequence: Synthetic peptide; note = [CTLA-4]_H0.25_L0 Anti-CTLA-4 Fv sequences (XENP19235 Fab, XENP19769 scFv) vlCDR1
RASQSVGSSYLA

SEQ ID NO: 37810 - protein, 7 aa, synthetic construct
  source 1..7: note = Description of Artificial Sequence: Synthetic peptide; note = [CTLA-4]_H0.25_L0 Anti-CTLA-4 Fv sequences (XENP19235 Fab, XENP19769 scFv) vlCDR2
GAFSRAT

SEQ ID NO: 37811 - protein, 9 aa, synthetic construct
  source 1..9: note = Description of Artificial Sequence: Synthetic peptide; note = [CTLA-4]_H0.25_L0 Anti-CTLA-4 Fv sequences (XENP19235 Fab, XENP19769 scFv) vlCDR3
QQYGSSPWT

SEQ ID NO: 37812 - protein, 246 aa, synthetic construct; identical to SEQ ID NO: 408
  source 1..246: note = Description of Artificial Sequence: Synthetic polypeptide; note = scFV of [CTLA-4]_H0.25_L0 Anti-CTLA-4 Fv sequences (XENP19235 Fab, XENP19769 scFv)

SEQ ID NO: 37813 - protein, 118 aa, synthetic construct; identical to SEQ ID NO: 418
  source 1..118: note = Description of Artificial Sequence: Synthetic polypeptide; note = VH of [CTLA-4]_H0.26_L0 Anti-CTLA-4 Fv sequences (XENP19236 Fab, XENP19770 scFv)

SEQ ID NO: 37814 - protein, 5 aa, synthetic construct
  source 1..5: note = Description of Artificial Sequence: Synthetic peptide; note = [CTLA-4]_H0.26_L0 Anti-CTLA-4 Fv sequences (XENP19236 Fab, XENP19770 scFv) vhCDR1
SYGMH

SEQ ID NO: 37815 - protein, 17 aa, synthetic construct
  source 1..17: note = Description of Artificial Sequence: Synthetic peptide; note = [CTLA-4]_H0.26_L0 Anti-CTLA-4 Fv sequences (XENP19236 Fab, XENP19770 scFv) vhCDR2
FISYDGNNKYYADSVKG

SEQ ID NO: 37816 - protein, 9 aa, synthetic construct
  source 1..9: note = Description of Artificial Sequence: Synthetic peptide; note = [CTLA-4]_H0.26_L0 Anti-CTLA-4 Fv sequences (XENP19236 Fab, XENP19770 scFv) vhCDR3
TGWLGPFDY

SEQ ID NO: 37817 - protein, 108 aa, synthetic construct; identical to SEQ ID NO: 23
  source 1..108: note = Description of Artificial Sequence: Synthetic polypeptide; note = VL of [CTLA-4]_H0.26_L0 Anti-CTLA-4 Fv sequences (XENP19236 Fab, XENP19770 scFv)

SEQ ID NO: 37818 - protein, 12 aa, synthetic construct
  source 1..12: note = Description of Artificial Sequence: Synthetic peptide; note = [CTLA-4]_H0.26_L0 Anti-CTLA-4 Fv sequences (XENP19236 Fab, XENP19770 scFv) vlCDR1
RASQSVGSSYLA

SEQ ID NO: 37819 - protein, 7 aa, synthetic construct
  source 1..7: note = Description of Artificial Sequence: Synthetic peptide; note = [CTLA-4]_H0.26_L0 Anti-CTLA-4 Fv sequences (XENP19236 Fab, XENP19770 scFv) vlCDR2
GAFSRAT

SEQ ID NO: 37820 - protein, 9 aa, synthetic construct
  source 1..9: note = Description of Artificial Sequence: Synthetic peptide; note = [CTLA-4]_H0.26_L0 Anti-CTLA-4 Fv sequences (XENP19236 Fab, XENP19770 scFv) vlCDR3
QQYGSSPWT

SEQ ID NO: 37821 - protein, 246 aa, synthetic construct; identical to SEQ ID NO: 417
  source 1..246: note = Description of Artificial Sequence: Synthetic polypeptide; note = scFV of [CTLA-4]_H0.26_L0 Anti-CTLA-4 Fv sequences (XENP19236  Fab, XENP19770 scFv)

SEQ ID NO: 37822 - protein, 118 aa, synthetic construct; identical to SEQ ID NO: 427
  source 1..118: note = Description of Artificial Sequence: Synthetic polypeptide; note = VH of [CTLA-4]_H0.27_L0 Anti-CTLA-4 Fv sequences (XENP19237  Fab, XENP19771 scFv)

SEQ ID NO: 37823 - protein, 5 aa, synthetic construct
  source 1..5: note = Description of Artificial Sequence: Synthetic peptide; note = [CTLA-4]_H0.27_L0 Anti-CTLA-4 Fv sequences (XENP19237 Fab,  XENP19771 scFv) vhCDR1
SYSMH

SEQ ID NO: 37824 - protein, 17 aa, synthetic construct
  source 1..17: note = Description of Artificial Sequence: Synthetic peptide; note = [CTLA-4]_H0.27_L0 Anti-CTLA-4 Fv sequences (XENP19237 Fab,  XENP19771 scFv) vhCDR2
FISYDGNNKYYADSVKG

SEQ ID NO: 37825 - protein, 9 aa, synthetic construct
  source 1..9: note = Description of Artificial Sequence: Synthetic peptide; note = [CTLA-4]_H0.27_L0 Anti-CTLA-4 Fv sequences (XENP19237 Fab, XENP19771 scFv) vhCDR3
TGWLGPFDY

SEQ ID NO: 37826 - protein, 108 aa, synthetic construct; identical to SEQ ID NO: 23
  source 1..108: note = Description of Artificial Sequence: Synthetic polypeptide; note = VL of [CTLA-4]_H0.27_L0 Anti-CTLA-4 Fv sequences (XENP19237  Fab, XENP19771 scFv)

SEQ ID NO: 37827 - protein, 12 aa, synthetic construct
  source 1..12: note = Description of Artificial Sequence: Synthetic peptide; note = [CTLA-4]_H0.27_L0 Anti-CTLA-4 Fv sequences (XENP19237 Fab,  XENP19771 scFv) vlCDR1
RASQSVGSSYLA

SEQ ID NO: 37828 - protein, 7 aa, synthetic construct
  source 1..7: note = Description of Artificial Sequence: Synthetic peptide; note = [CTLA-4]_H0.27_L0 Anti-CTLA-4 Fv sequences (XENP19237 Fab, XENP19771 scFv) vlCDR2
GAFSRAT

SEQ ID NO: 37829 - protein, 9 aa, synthetic construct
  source 1..9: note = Description of Artificial Sequence: Synthetic peptide; note = [CTLA-4]_H0.27_L0 Anti-CTLA-4 Fv sequences (XENP19237 Fab, XENP19771 scFv) vlCDR3
QQYGSSPWT

SEQ ID NO: 37830 - protein, 246 aa, synthetic construct; identical to SEQ ID NO: 426
  source 1..246: note = Description of Artificial Sequence: Synthetic polypeptide; note = scFV of [CTLA-4]_H0.27_L0 Anti-CTLA-4 Fv sequences (XENP19237 Fab, XENP19771 scFv)

SEQ ID NO: 37831 - protein, 246 aa, synthetic construct; identical to SEQ ID NO: 444
  source 1..246: note = Description of Artificial Sequence: Synthetic polypeptide; note = scFV of [CTLA-4]_H0.29_L0 Fab XENP19773, scFv XENP19239

SEQ ID NO: 37832 - protein, 118 aa, synthetic construct; identical to SEQ ID NO: 526
  source 1..118: note = Description of Artificial Sequence: Synthetic polypeptide; note = VH of [CTLA-4]_H0.38_L0 (Fab XENP19248, scFv XENP19782)

SEQ ID NO: 37833 - protein, 5 aa, synthetic construct
  source 1..5: note = Description of Artificial Sequence: Synthetic peptide; note = [CTLA-4]_H0.38_L0 (Fab XENP19248, scFv XENP19782) vhCDR1
SYTMH

SEQ ID NO: 37834 - protein, 17 aa, synthetic construct
  source 1..17: note = Description of Artificial Sequence: Synthetic peptide; note = [CTLA-4]_H0.38_L0 (Fab XENP19248, scFv XENP19782) vhCDR2
FISYDGNNKYYADSVKG

SEQ ID NO: 37835 - protein, 9 aa, synthetic construct
  source 1..9: note = Description of Artificial Sequence: Synthetic peptide; note = [CTLA-4]_H0.38_L0 (Fab XENP19248, scFv XENP19782) vhCDR3
TGWLGPFDY

SEQ ID NO: 37836 - protein, 108 aa, synthetic construct; identical to SEQ ID NO: 23
  source 1..108: note = Description of Artificial Sequence: Synthetic polypeptide; note = VL of [CTLA-4]_H0.38_L0 (Fab XENP19248, scFv XENP19782)

SEQ ID NO: 37837 - protein, 12 aa, synthetic construct
  source 1..12: note = Description of Artificial Sequence: Synthetic peptide; note = [CTLA-4]_H0.38_L0 (Fab XENP19248, scFv XENP19782) vlCDR1
RASQSVGSSYLA

SEQ ID NO: 37838 - protein, 7 aa, synthetic construct
  source 1..7: note = Description of Artificial Sequence: Synthetic peptide; note = [CTLA-4]_H0.38_L0 (Fab XENP19248, scFv XENP19782) vlCDR2
GAFSRAT

SEQ ID NO: 37839 - protein, 9 aa, synthetic construct
  source 1..9: note = Description of Artificial Sequence: Synthetic peptide; note = [CTLA-4]_H0.38_L0 (Fab XENP19248, scFv XENP19782) vlCDR3
QQYGSSPWT

SEQ ID NO: 37840 - protein, 246 aa, synthetic construct; identical to SEQ ID NO: 525
  source 1..246: note = Description of Artificial Sequence: Synthetic polypeptide; note = scFV of [CTLA-4]_H0.38_L0 (Fab XENP19248, scFv XENP19782)

SEQ ID NO: 37841 - protein, 118 aa, synthetic construct; identical to SEQ ID NO: 535
  source 1..118: note = Description of Artificial Sequence: Synthetic polypeptide; note = VH of [CTLA-4]_H0.39_L0 (Fab XENP19249, scFv XENP19783)

SEQ ID NO: 37842 - protein, 5 aa, synthetic construct
  source 1..5: note = Description of Artificial Sequence: Synthetic peptide; note = [CTLA-4]_H0.39_L0 (Fab XENP19249, scFv XENP19783) vhCDR1
SYTMH

SEQ ID NO: 37843 - protein, 17 aa, synthetic construct
  source 1..17: note = Description of Artificial Sequence: Synthetic peptide; note = [CTLA-4]_H0.39_L0 (Fab XENP19249, scFv XENP19783) vhCDR2
FISYDGNNKYYADSVKG

SEQ ID NO: 37844 - protein, 9 aa, synthetic construct
  source 1..9: note = Description of Artificial Sequence: Synthetic peptide; note = [CTLA-4]_H0.39_L0 (Fab XENP19249, scFv XENP19783) vhCDR3
TGWLGPFDY

SEQ ID NO: 37845 - protein, 108 aa, synthetic construct; identical to SEQ ID NO: 23
  source 1..108: note = Description of Artificial Sequence: Synthetic polypeptide; note = VL of [CTLA-4]_H0.39_L0 (Fab XENP19249, scFv XENP19783)

SEQ ID NO: 37846 - protein, 12 aa, synthetic construct
  source 1..12: note = Description of Artificial Sequence: Synthetic peptide; note = [CTLA-4]_H0.39_L0 (Fab XENP19249, scFv XENP19783) vlCDR1
RASQSVGSSYLA

SEQ ID NO: 37847 - protein, 7 aa, synthetic construct
  source 1..7: note = Description of Artificial Sequence: Synthetic peptide; note = [CTLA-4]_H0.39_L0 (Fab XENP19249, scFv XENP19783) vlCDR2
GAFSRAT

SEQ ID NO: 37848 - protein, 9 aa, synthetic construct
  source 1..9: note = Description of Artificial Sequence: Synthetic peptide; note = [CTLA-4]_H0.39_L0 (Fab XENP19249, scFv XENP19783) vlCDR3
QQYGSSPWT

SEQ ID NO: 37849 - protein, 246 aa, synthetic construct; identical to SEQ ID NO: 534
  source 1..246: note = Description of Artificial Sequence: Synthetic polypeptide; note = scFV of [CTLA-4]_H0.39_L0 (Fab XENP19249, scFv XENP19783)

SEQ ID NO: 37850 - protein, 118 aa, synthetic construct; identical to SEQ ID NO: 544
  source 1..118: note = Description of Artificial Sequence: Synthetic polypeptide; note = VH of [CTLA-4]_H0.40_L0 (Fab XENP19250, scFv XENP19784)

SEQ ID NO: 37851 - protein, 5 aa, synthetic construct
  source 1..5: note = Description of Artificial Sequence: Synthetic peptide; note = [CTLA-4]_H0.40_L0 (Fab XENP19250, scFv XENP19784) vhCDR1
SYTMH

SEQ ID NO: 37852 - protein, 17 aa, synthetic construct
  source 1..17: note = Description of Artificial Sequence: Synthetic peptide; note = [CTLA-4]_H0.40_L0 (Fab XENP19250, scFv XENP19784) vhCDR2
FISYDGNNKYYADSVKG

SEQ ID NO: 37853 - protein, 9 aa, synthetic construct
  source 1..9: note = Description of Artificial Sequence: Synthetic peptide; note = [CTLA-4]_H0.40_L0 (Fab XENP19250, scFv XENP19784) vhCDR3
TGWLGPFDY

SEQ ID NO: 37854 - protein, 108 aa, synthetic construct; identical to SEQ ID NO: 23
  source 1..108: note = Description of Artificial Sequence: Synthetic polypeptide; note = VL of [CTLA-4]_H0.40_L0 (Fab XENP19250, scFv XENP19784)

SEQ ID NO: 37855 - protein, 12 aa, synthetic construct
  source 1..12: note = Description of Artificial Sequence: Synthetic peptide; note = [CTLA-4]_H0.40_L0 (Fab XENP19250, scFv XENP19784) vlCDR1
RASQSVGSSYLA

SEQ ID NO: 37856 - protein, 7 aa, synthetic construct
  source 1..7: note = Description of Artificial Sequence: Synthetic peptide; note = [CTLA-4]_H0.40_L0 (Fab XENP19250, scFv XENP19784) vlCDR2
GAFSRAT

SEQ ID NO: 37857 - protein, 9 aa, synthetic construct
  source 1..9: note = Description of Artificial Sequence: Synthetic peptide; note = [CTLA-4]_H0.40_L0 (Fab XENP19250, scFv XENP19784) vlCDR3
QQYGSSPWT

SEQ ID NO: 37858 - protein, 246 aa, synthetic construct; identical to SEQ ID NO: 543
  source 1..246: note = Description of Artificial Sequence: Synthetic polypeptide; note = scFV of [CTLA-4]_H0.40_L0 (Fab XENP19250, scFv XENP19784)

SEQ ID NO: 37859 - protein, 118 aa, synthetic construct; identical to SEQ ID NO: 814
  source 1..118: note = Description of Artificial Sequence: Synthetic polypeptide; note = VH of [CTLA-4]_H0.70_L0  (Fab XENP19280, scFv XENP19818)

SEQ ID NO: 37860 - protein, 5 aa, synthetic construct
  source 1..5: note = Description of Artificial Sequence: Synthetic peptide; note = [CTLA-4]_H0.70_L0  (Fab XENP19280, scFv XENP19818) vhCDR1
SYTMH

SEQ ID NO: 37861 - protein, 17 aa, synthetic construct
  source 1..17: note = Description of Artificial Sequence: Synthetic peptide; note = [CTLA-4]_H0.70_L0  (Fab XENP19280, scFv XENP19818) vhCDR2
FISYDGSNKYYADSVKG

SEQ ID NO: 37862 - protein, 9 aa, synthetic construct
  source 1..9: note = Description of Artificial Sequence: Synthetic peptide; note = [CTLA-4]_H0.70_L0  (Fab XENP19280, scFv XENP19818) vhCDR3
TGWLGPFDY

SEQ ID NO: 37863 - protein, 108 aa, synthetic construct; identical to SEQ ID NO: 23
  source 1..108: note = Description of Artificial Sequence: Synthetic polypeptide; note = VL of [CTLA-4]_H0.70_L0  (Fab XENP19280, scFv XENP19818)

SEQ ID NO: 37864 - protein, 12 aa, synthetic construct
  source 1..12: note = Description of Artificial Sequence: Synthetic peptide; note = [CTLA-4]_H0.70_L0  (Fab XENP19280, scFv XENP19818) vlCDR1
RASQSVGSSYLA

SEQ ID NO: 37865 - protein, 7 aa, synthetic construct
  source 1..7: note = Description of Artificial Sequence: Synthetic peptide; note = [CTLA-4]_H0.70_L0  (Fab XENP19280, scFv XENP19818) vlCDR2
GAFSRAT

SEQ ID NO: 37866 - protein, 9 aa, synthetic construct
  source 1..9: note = Description of Artificial Sequence: Synthetic peptide; note = [CTLA-4]_H0.70_L0  (Fab XENP19280, scFv XENP19818) vlCDR3
QQYGSSPWT

SEQ ID NO: 37867 - protein, 246 aa, synthetic construct; identical to SEQ ID NO: 813
  source 1..246: note = Description of Artificial Sequence: Synthetic polypeptide; note = scFV of [CTLA-4]_H0.70_L0  (Fab XENP19280, scFv XENP19818)

SEQ ID NO: 37868 - protein, 118 aa, synthetic construct; identical to SEQ ID NO: 22
  source 1..118: note = Description of Artificial Sequence: Synthetic polypeptide; note = VH of [CTLA-4]_H0_L0.22  (Fab XENP19437, scFv XENP19910)

SEQ ID NO: 37869 - protein, 5 aa, synthetic construct
  source 1..5: note = Description of Artificial Sequence: Synthetic peptide; note = [CTLA-4]_H0_L0.22  (Fab XENP19437, scFv XENP19910) vhCDR1
SYTMH

SEQ ID NO: 37870 - protein, 17 aa, synthetic construct
  source 1..17: note = Description of Artificial Sequence: Synthetic peptide; note = [CTLA-4]_H0_L0.22  (Fab XENP19437, scFv XENP19910) vhCDR2
FISYDGNNKYYADSVKG

SEQ ID NO: 37871 - protein, 9 aa, synthetic construct
  source 1..9: note = Description of Artificial Sequence: Synthetic peptide; note = [CTLA-4]_H0_L0.22  (Fab XENP19437, scFv XENP19910) vhCDR3
TGWLGPFDY

SEQ ID NO: 37872 - protein, 108 aa, synthetic construct; identical to SEQ ID NO: 1607
  source 1..108: note = Description of Artificial Sequence: Synthetic polypeptide; note = VL of [CTLA-4]_H0_L0.22  (Fab XENP19437, scFv XENP19910)

SEQ ID NO: 37873 - protein, 12 aa, synthetic construct
  source 1..12: note = Description of Artificial Sequence: Synthetic peptide; note = [CTLA-4]_H0_L0.22  (Fab XENP19437, scFv XENP19910) vlCDR1
RASQSVSSSYLA

SEQ ID NO: 37874 - protein, 7 aa, synthetic construct
  source 1..7: note = Description of Artificial Sequence: Synthetic peptide; note = [CTLA-4]_H0_L0.22  (Fab XENP19437, scFv XENP19910) vlCDR2
GAFSRAT

SEQ ID NO: 37875 - protein, 9 aa, synthetic construct
  source 1..9: note = Description of Artificial Sequence: Synthetic peptide; note = [CTLA-4]_H0_L0.22  (Fab XENP19437, scFv XENP19910) vlCDR3
QQYGSSPWT

SEQ ID NO: 37876 - protein, 246 aa, synthetic construct; identical to SEQ ID NO: 1605
  source 1..246: note = Description of Artificial Sequence: Synthetic polypeptide; note = scFV of [CTLA-4]_H0_L0.22  (Fab XENP19437, scFv XENP19910)

SEQ ID NO: 37877 - protein, 118 aa, synthetic construct; identical to SEQ ID NO: 130
  source 1..118: note = Description of Artificial Sequence: Synthetic polypeptide; note = VH of [CTLA-4]_H2_L0  (Fab XENP,19545 scFv XENP19552)

SEQ ID NO: 37878 - protein, 5 aa, synthetic construct
  source 1..5: note = Description of Artificial Sequence: Synthetic peptide; note = [CTLA-4]_H2_L0  (Fab XENP,19545 scFv XENP19552) vhCDR1
SYTMH

SEQ ID NO: 37879 - protein, 17 aa, synthetic construct
  source 1..17: note = Description of Artificial Sequence: Synthetic peptide; note = [CTLA-4]_H2_L0  (Fab XENP,19545 scFv XENP19552) vhCDR2
FISYDGNNKYYPGSVKG

SEQ ID NO: 37880 - protein, 9 aa, synthetic construct
  source 1..9: note = Description of Artificial Sequence: Synthetic peptide; note = [CTLA-4]_H2_L0  (Fab XENP,19545 scFv XENP19552) vhCDR3
TGWLGPFDY

SEQ ID NO: 37881 - protein, 108 aa, synthetic construct; identical to SEQ ID NO: 23
  source 1..108: note = Description of Artificial Sequence: Synthetic polypeptide; note = VL of [CTLA-4]_H2_L0  (Fab XENP,19545 scFv XENP19552)

SEQ ID NO: 37882 - protein, 12 aa, synthetic construct
  source 1..12: note = Description of Artificial Sequence: Synthetic peptide; note = [CTLA-4]_H2_L0  (Fab XENP,19545 scFv XENP19552) vlCDR1
RASQSVGSSYLA

SEQ ID NO: 37883 - protein, 7 aa, synthetic construct
  source 1..7: note = Description of Artificial Sequence: Synthetic peptide; note = [CTLA-4]_H2_L0  (Fab XENP,19545 scFv XENP19552) vlCDR2
GAFSRAT

SEQ ID NO: 37884 - protein, 9 aa, synthetic construct
  source 1..9: note = Description of Artificial Sequence: Synthetic peptide; note = [CTLA-4]_H2_L0  (Fab XENP,19545 scFv XENP19552) vlCDR3
QQYGSSPWT

SEQ ID NO: 37885 - protein, 246 aa, synthetic construct; identical to SEQ ID NO: 129
  source 1..246: note = Description of Artificial Sequence: Synthetic polypeptide; note = scFV of [CTLA-4]_H2_L0  (Fab XENP,19545 scFv XENP19552)

SEQ ID NO: 37886 - protein, 118 aa, synthetic construct; identical to SEQ ID NO: 2614
  source 1..118: note = Description of Artificial Sequence: Synthetic polypeptide; note = VH of [CTLA-4]_H3.21_L0.124  (Fab XENP20422, scFv XENP20431)

SEQ ID NO: 37887 - protein, 5 aa, synthetic construct
  source 1..5: note = Description of Artificial Sequence: Synthetic peptide; note = [CTLA-4]_H3.21_L0.124  (Fab XENP20422, scFv XENP20431) vhCDR1
SYTMH

SEQ ID NO: 37888 - protein, 17 aa, synthetic construct
  source 1..17: note = Description of Artificial Sequence: Synthetic peptide; note = [CTLA-4]_H3.21_L0.124  (Fab XENP20422, scFv XENP20431) vhCDR2
FISYDGNTKYYADSVKG

SEQ ID NO: 37889 - protein, 9 aa, synthetic construct
  source 1..9: note = Description of Artificial Sequence: Synthetic peptide; note = [CTLA-4]_H3.21_L0.124  (Fab XENP20422, scFv XENP20431) vhCDR3
GGLLGPFDL

SEQ ID NO: 37890 - protein, 108 aa, synthetic construct; identical to SEQ ID NO: 2723
  source 1..108: note = Description of Artificial Sequence: Synthetic polypeptide; note = VL of [CTLA-4]_H3.21_L0.124  (Fab XENP20422, scFv XENP20431)

SEQ ID NO: 37891 - protein, 12 aa, synthetic construct
  source 1..12: note = Description of Artificial Sequence: Synthetic peptide; note = [CTLA-4]_H3.21_L0.124  (Fab XENP20422, scFv XENP20431) vlCDR1
RASQSVGSSYLA

SEQ ID NO: 37892 - protein, 7 aa, synthetic construct
  source 1..7: note = Description of Artificial Sequence: Synthetic peptide; note = [CTLA-4]_H3.21_L0.124  (Fab XENP20422, scFv XENP20431) vlCDR2
GASSRAT

SEQ ID NO: 37893 - protein, 9 aa, synthetic construct
  source 1..9: note = Description of Artificial Sequence: Synthetic peptide; note = [CTLA-4]_H3.21_L0.124  (Fab XENP20422, scFv XENP20431) vlCDR3
QQYGSSPWT

SEQ ID NO: 37894 - protein, 246 aa, synthetic construct; identical to SEQ ID NO: 2838
  source 1..246: note = Description of Artificial Sequence: Synthetic polypeptide; note = scFV of [CTLA-4]_H3.21_L0.124  (Fab XENP20422, scFv XENP20431)

SEQ ID NO: 37895 - protein, 118 aa, synthetic construct; identical to SEQ ID NO: 2614
  source 1..118: note = Description of Artificial Sequence: Synthetic polypeptide; note = VH of [CTLA-4]_H3.21_L0.129  (Fab XENP20423, scFv XENP20432)

SEQ ID NO: 37896 - protein, 5 aa, synthetic construct
  source 1..5: note = Description of Artificial Sequence: Synthetic peptide; note = [CTLA-4]_H3.21_L0.129  (Fab XENP20423, scFv XENP20432) vhCDR1
SYTMH

SEQ ID NO: 37897 - protein, 17 aa, synthetic construct
  source 1..17: note = Description of Artificial Sequence: Synthetic peptide; note = [CTLA-4]_H3.21_L0.129  (Fab XENP20423, scFv XENP20432) vhCDR2
FISYDGNTKYYADSVKG

SEQ ID NO: 37898 - protein, 9 aa, synthetic construct
  source 1..9: note = Description of Artificial Sequence: Synthetic peptide; note = [CTLA-4]_H3.21_L0.129  (Fab XENP20423, scFv XENP20432) vhCDR3
GGLLGPFDL

SEQ ID NO: 37899 - protein, 108 aa, synthetic construct; identical to SEQ ID NO: 2768
  source 1..108: note = Description of Artificial Sequence: Synthetic polypeptide; note = VL of [CTLA-4]_H3.21_L0.129  (Fab XENP20423, scFv XENP20432)

SEQ ID NO: 37900 - protein, 12 aa, synthetic construct
  source 1..12: note = Description of Artificial Sequence: Synthetic peptide; note = [CTLA-4]_H3.21_L0.129  (Fab XENP20423, scFv XENP20432) vlCDR1
RASQSVGSSYLA

SEQ ID NO: 37901 - protein, 7 aa, synthetic construct
  source 1..7: note = Description of Artificial Sequence: Synthetic peptide; note = [CTLA-4]_H3.21_L0.129  (Fab XENP20423, scFv XENP20432) vlCDR2
GASSRAT

SEQ ID NO: 37902 - protein, 9 aa, synthetic construct
  source 1..9: note = Description of Artificial Sequence: Synthetic peptide; note = [CTLA-4]_H3.21_L0.129  (Fab XENP20423, scFv XENP20432) vlCDR3
QQYGSSPWT

SEQ ID NO: 37903 - protein, 246 aa, synthetic construct; identical to SEQ ID NO: 2847
  source 1..246: note = Description of Artificial Sequence: Synthetic polypeptide; note = scFV of [CTLA-4]_H3.21_L0.129  (Fab XENP20423, scFv XENP20432)

SEQ ID NO: 37904 - protein, 118 aa, synthetic construct; identical to SEQ ID NO: 2614
  source 1..118: note = Description of Artificial Sequence: Synthetic polypeptide; note = VH of [CTLA-4]_H3.21_L0.132  (Fab XENP20424, scFv XENP20433)

SEQ ID NO: 37905 - protein, 5 aa, synthetic construct
  source 1..5: note = Description of Artificial Sequence: Synthetic peptide; note = [CTLA-4]_H3.21_L0.132  (Fab XENP20424, scFv XENP20433) vhCDR1
SYTMH

SEQ ID NO: 37906 - protein, 17 aa, synthetic construct
  source 1..17: note = Description of Artificial Sequence: Synthetic peptide; note = [CTLA-4]_H3.21_L0.132  (Fab XENP20424, scFv XENP20433) vhCDR2
FISYDGNTKYYADSVKG

SEQ ID NO: 37907 - protein, 9 aa, synthetic construct
  source 1..9: note = Description of Artificial Sequence: Synthetic peptide; note = [CTLA-4]_H3.21_L0.132  (Fab XENP20424, scFv XENP20433) vhCDR3
GGLLGPFDL

SEQ ID NO: 37908 - protein, 108 aa, synthetic construct; identical to SEQ ID NO: 2795
  source 1..108: note = Description of Artificial Sequence: Synthetic polypeptide; note = VL of [CTLA-4]_H3.21_L0.132  (Fab XENP20424, scFv XENP20433)

SEQ ID NO: 37909 - protein, 12 aa, synthetic construct
  source 1..12: note = Description of Artificial Sequence: Synthetic peptide; note = [CTLA-4]_H3.21_L0.132  (Fab XENP20424, scFv XENP20433) vlCDR1
RASQSVSSSYLA

SEQ ID NO: 37910 - protein, 7 aa, synthetic construct
  source 1..7: note = Description of Artificial Sequence: Synthetic peptide; note = [CTLA-4]_H3.21_L0.132  (Fab XENP20424, scFv XENP20433) vlCDR2
GASSRAT

SEQ ID NO: 37911 - protein, 9 aa, synthetic construct
  source 1..9: note = Description of Artificial Sequence: Synthetic peptide; note = [CTLA-4]_H3.21_L0.132  (Fab XENP20424, scFv XENP20433) vlCDR3
QQYGSSPWT

SEQ ID NO: 37912 - protein, 246 aa, synthetic construct; identical to SEQ ID NO: 2856
  source 1..246: note = Description of Artificial Sequence: Synthetic polypeptide; note = scFV of [CTLA-4]_H3.21_L0.132  (Fab XENP20424, scFv XENP20433)

SEQ ID NO: 37913 - protein, 118 aa, synthetic construct; identical to SEQ ID NO: 2632
  source 1..118: note = Description of Artificial Sequence: Synthetic polypeptide; note = VH of [CTLA-4]_H3.23_L0.124  (Fab XENP20425, scFv XENP20434)

SEQ ID NO: 37914 - protein, 5 aa, synthetic construct
  source 1..5: note = Description of Artificial Sequence: Synthetic peptide; note = [CTLA-4]_H3.23_L0.124  (Fab XENP20425, scFv XENP20434) vhCDR1
SYTMH

SEQ ID NO: 37915 - protein, 17 aa, synthetic construct
  source 1..17: note = Description of Artificial Sequence: Synthetic peptide; note = [CTLA-4]_H3.23_L0.124  (Fab XENP20425, scFv XENP20434) vhCDR2
FISYDGNYKYYADSVKG

SEQ ID NO: 37916 - protein, 9 aa, synthetic construct
  source 1..9: note = Description of Artificial Sequence: Synthetic peptide; note = [CTLA-4]_H3.23_L0.124  (Fab XENP20425, scFv XENP20434) vhCDR3
GGHLGPFDL

SEQ ID NO: 37917 - protein, 108 aa, synthetic construct; identical to SEQ ID NO: 2723
  source 1..108: note = Description of Artificial Sequence: Synthetic polypeptide; note = VL of [CTLA-4]_H3.23_L0.124  (Fab XENP20425, scFv XENP20434)

SEQ ID NO: 37918 - protein, 12 aa, synthetic construct
  source 1..12: note = Description of Artificial Sequence: Synthetic peptide; note = [CTLA-4]_H3.23_L0.124  (Fab XENP20425, scFv XENP20434) vlCDR1
RASQSVGSSYLA

SEQ ID NO: 37919 - protein, 7 aa, synthetic construct
  source 1..7: note = Description of Artificial Sequence: Synthetic peptide; note = [CTLA-4]_H3.23_L0.124  (Fab XENP20425, scFv XENP20434) vlCDR2
GASSRAT

SEQ ID NO: 37920 - protein, 9 aa, synthetic construct
  source 1..9: note = Description of Artificial Sequence: Synthetic peptide; note = [CTLA-4]_H3.23_L0.124  (Fab XENP20425, scFv XENP20434) vlCDR3
QQYGSSPWT

SEQ ID NO: 37921 - protein, 246 aa, synthetic construct; identical to SEQ ID NO: 2865
  source 1..246: note = Description of Artificial Sequence: Synthetic polypeptide; note = scFV of [CTLA-4]_H3.23_L0.124  (Fab XENP20425, scFv XENP20434)

SEQ ID NO: 37922 - protein, 118 aa, synthetic construct; identical to SEQ ID NO: 2632
  source 1..118: note = Description of Artificial Sequence: Synthetic polypeptide; note = VH of [CTLA-4]_H3.23_L0.129  (Fab XENP20426, scFv XENP20435)

SEQ ID NO: 37923 - protein, 5 aa, synthetic construct
  source 1..5: note = Description of Artificial Sequence: Synthetic peptide; note = [CTLA-4]_H3.23_L0.129  (Fab XENP20426, scFv XENP20435) vhCDR1
SYTMH

SEQ ID NO: 37924 - protein, 17 aa, synthetic construct
  source 1..17: note = Description of Artificial Sequence: Synthetic peptide; note = [CTLA-4]_H3.23_L0.129  (Fab XENP20426, scFv XENP20435) vhCDR2
FISYDGNYKYYADSVKG

SEQ ID NO: 37925 - protein, 9 aa, synthetic construct
  source 1..9: note = Description of Artificial Sequence: Synthetic peptide; note = [CTLA-4]_H3.23_L0.129  (Fab XENP20426, scFv XENP20435) vhCDR3
GGHLGPFDL

SEQ ID NO: 37926 - protein, 108 aa, synthetic construct; identical to SEQ ID NO: 2768
  source 1..108: note = Description of Artificial Sequence: Synthetic polypeptide; note = VL of [CTLA-4]_H3.23_L0.129  (Fab XENP20426, scFv XENP20435)

SEQ ID NO: 37927 - protein, 12 aa, synthetic construct
  source 1..12: note = Description of Artificial Sequence: Synthetic peptide; note = [CTLA-4]_H3.23_L0.129  (Fab XENP20426, scFv XENP20435) vlCDR1
RASQSVGSSYLA

SEQ ID NO: 37928 - protein, 7 aa, synthetic construct
  source 1..7: note = Description of Artificial Sequence: Synthetic peptide; note = [CTLA-4]_H3.23_L0.129  (Fab XENP20426, scFv XENP20435) vlCDR2
GASSRAT

SEQ ID NO: 37929 - protein, 9 aa, synthetic construct
  source 1..9: note = Description of Artificial Sequence: Synthetic peptide; note = [CTLA-4]_H3.23_L0.129  (Fab XENP20426, scFv XENP20435) vlCDR3
QQYGSSPWT

SEQ ID NO: 37930 - protein, 246 aa, synthetic construct; identical to SEQ ID NO: 2874
  source 1..246: note = Description of Artificial Sequence: Synthetic polypeptide; note = scFV of [CTLA-4]_H3.23_L0.129  (Fab XENP20426, scFv XENP20435)

SEQ ID NO: 37931 - protein, 118 aa, synthetic construct; identical to SEQ ID NO: 2632
  source 1..118: note = Description of Artificial Sequence: Synthetic polypeptide; note = VH of [CTLA-4]_H3.23_L0.132  (Fab XENP20427, scFv XENP20436)

SEQ ID NO: 37932 - protein, 5 aa, synthetic construct
  source 1..5: note = Description of Artificial Sequence: Synthetic peptide; note = [CTLA-4]_H3.23_L0.132  (Fab XENP20427, scFv XENP20436) vhCDR1
SYTMH

SEQ ID NO: 37933 - protein, 17 aa, synthetic construct
  source 1..17: note = Description of Artificial Sequence: Synthetic peptide; note = [CTLA-4]_H3.23_L0.132  (Fab XENP20427, scFv XENP20436) vhCDR2
FISYDGNYKYYADSVKG

SEQ ID NO: 37934 - protein, 9 aa, synthetic construct
  source 1..9: note = Description of Artificial Sequence: Synthetic peptide; note = [CTLA-4]_H3.23_L0.132  (Fab XENP20427, scFv XENP20436) vhCDR3
GGHLGPFDL

SEQ ID NO: 37935 - protein, 108 aa, synthetic construct; identical to SEQ ID NO: 2795
  source 1..108: note = Description of Artificial Sequence: Synthetic polypeptide; note = VL of [CTLA-4]_H3.23_L0.132  (Fab XENP20427, scFv XENP20436)

SEQ ID NO: 37936 - protein, 12 aa, synthetic construct
  source 1..12: note = Description of Artificial Sequence: Synthetic peptide; note = [CTLA-4]_H3.23_L0.132  (Fab XENP20427, scFv XENP20436) vlCDR1
RASQSVSSSYLA

SEQ ID NO: 37937 - protein, 7 aa, synthetic construct
  source 1..7: note = Description of Artificial Sequence: Synthetic peptide; note = [CTLA-4]_H3.23_L0.132  (Fab XENP20427, scFv XENP20436) vlCDR2
GASSRAT

SEQ ID NO: 37938 - protein, 9 aa, synthetic construct
  source 1..9: note = Description of Artificial Sequence: Synthetic peptide; note = [CTLA-4]_H3.23_L0.132  (Fab XENP20427, scFv XENP20436) vlCDR3
QQYGSSPWT

SEQ ID NO: 37939 - protein, 246 aa, synthetic construct; identical to SEQ ID NO: 2883
  source 1..246: note = Description of Artificial Sequence: Synthetic polypeptide; note = scFV of [CTLA-4]_H3.23_L0.132  (Fab XENP20427, scFv XENP20436)

SEQ ID NO: 37940 - protein, 118 aa, synthetic construct; identical to SEQ ID NO: 2650
  source 1..118: note = Description of Artificial Sequence: Synthetic polypeptide; note = VH of [CTLA-4]_H3.25_L0.124  (Fab XENP20428, scFv XENP20437)

SEQ ID NO: 37941 - protein, 5 aa, synthetic construct
  source 1..5: note = Description of Artificial Sequence: Synthetic peptide; note = [CTLA-4]_H3.25_L0.124  (Fab XENP20428, scFv XENP20437) vhCDR1
SYTMH

SEQ ID NO: 37942 - protein, 17 aa, synthetic construct
  source 1..17: note = Description of Artificial Sequence: Synthetic peptide; note = [CTLA-4]_H3.25_L0.124  (Fab XENP20428, scFv XENP20437) vhCDR2
FISYDGNYKYYADSVKG

SEQ ID NO: 37943 - protein, 9 aa, synthetic construct
  source 1..9: note = Description of Artificial Sequence: Synthetic peptide; note = [CTLA-4]_H3.25_L0.124  (Fab XENP20428, scFv XENP20437) vhCDR3
GGLLGPFDL

SEQ ID NO: 37944 - protein, 108 aa, synthetic construct; identical to SEQ ID NO: 2723
  source 1..108: note = Description of Artificial Sequence: Synthetic polypeptide; note = VL of [CTLA-4]_H3.25_L0.124  (Fab XENP20428, scFv XENP20437)

SEQ ID NO: 37945 - protein, 12 aa, synthetic construct
  source 1..12: note = Description of Artificial Sequence: Synthetic peptide; note = [CTLA-4]_H3.25_L0.124  (Fab XENP20428, scFv XENP20437) vlCDR1
RASQSVGSSYLA

SEQ ID NO: 37946 - protein, 7 aa, synthetic construct
  source 1..7: note = Description of Artificial Sequence: Synthetic peptide; note = [CTLA-4]_H3.25_L0.124  (Fab XENP20428, scFv XENP20437) vlCDR2
GASSRAT

SEQ ID NO: 37947 - protein, 9 aa, synthetic construct
  source 1..9: note = Description of Artificial Sequence: Synthetic peptide; note = [CTLA-4]_H3.25_L0.124  (Fab XENP20428, scFv XENP20437) vlCDR3
QQYGSSPWT

SEQ ID NO: 37948 - protein, 246 aa, synthetic construct; identical to SEQ ID NO: 2892
  source 1..246: note = Description of Artificial Sequence: Synthetic polypeptide; note = scFV of [CTLA-4]_H3.25_L0.124  (Fab XENP20428, scFv XENP20437)

SEQ ID NO: 37949 - protein, 118 aa, synthetic construct; identical to SEQ ID NO: 2650
  source 1..118: note = Description of Artificial Sequence: Synthetic polypeptide; note = VH of [CTLA-4]_H3.25_L0.129  (Fab XENP20429, scFv XENP20438)

SEQ ID NO: 37950 - protein, 5 aa, synthetic construct
  source 1..5: note = Description of Artificial Sequence: Synthetic peptide; note = [CTLA-4]_H3.25_L0.129  (Fab XENP20429, scFv XENP20438) vhCDR1
SYTMH

SEQ ID NO: 37951 - protein, 17 aa, synthetic construct
  source 1..17: note = Description of Artificial Sequence: Synthetic peptide; note = [CTLA-4]_H3.25_L0.129  (Fab XENP20429, scFv XENP20438) vhCDR2
FISYDGNYKYYADSVKG

SEQ ID NO: 37952 - protein, 9 aa, synthetic construct
  source 1..9: note = Description of Artificial Sequence: Synthetic peptide; note = [CTLA-4]_H3.25_L0.129  (Fab XENP20429, scFv XENP20438) vhCDR3
GGLLGPFDL

SEQ ID NO: 37953 - protein, 108 aa, synthetic construct; identical to SEQ ID NO: 2768
  source 1..108: note = Description of Artificial Sequence: Synthetic polypeptide; note = VL of [CTLA-4]_H3.25_L0.129  (Fab XENP20429, scFv XENP20438)

SEQ ID NO: 37954 - protein, 12 aa, synthetic construct
  source 1..12: note = Description of Artificial Sequence: Synthetic peptide; note = [CTLA-4]_H3.25_L0.129  (Fab XENP20429, scFv XENP20438) vlCDR1
RASQSVGSSYLA

SEQ ID NO: 37955 - protein, 7 aa, synthetic construct
  source 1..7: note = Description of Artificial Sequence: Synthetic peptide; note = [CTLA-4]_H3.25_L0.129  (Fab XENP20429, scFv XENP20438) vlCDR2
GASSRAT

SEQ ID NO: 37956 - protein, 9 aa, synthetic construct
  source 1..9: note = Description of Artificial Sequence: Synthetic peptide; note = [CTLA-4]_H3.25_L0.129  (Fab XENP20429, scFv XENP20438) vlCDR3
QQYGSSPWT

SEQ ID NO: 37957 - protein, 246 aa, synthetic construct; identical to SEQ ID NO: 2901
  source 1..246: note = Description of Artificial Sequence: Synthetic polypeptide; note = scFV of [CTLA-4]_H3.25_L0.129  (Fab XENP20429, scFv XENP20438)

SEQ ID NO: 37958 - protein, 118 aa, synthetic construct; identical to SEQ ID NO: 2650
  source 1..118: note = Description of Artificial Sequence: Synthetic polypeptide; note = VH of [CTLA-4]_H3.25_L0.132  (Fab XENP20430, scFv XENP20439)

SEQ ID NO: 37959 - protein, 5 aa, synthetic construct
  source 1..5: note = Description of Artificial Sequence: Synthetic peptide; note = [CTLA-4]_H3.25_L0.132  (Fab XENP20430, scFv XENP20439) vhCDR1
SYTMH

SEQ ID NO: 37960 - protein, 17 aa, synthetic construct
  source 1..17: note = Description of Artificial Sequence: Synthetic peptide; note = [CTLA-4]_H3.25_L0.132  (Fab XENP20430, scFv XENP20439) vhCDR2
FISYDGNYKYYADSVKG

SEQ ID NO: 37961 - protein, 9 aa, synthetic construct
  source 1..9: note = Description of Artificial Sequence: Synthetic peptide; note = [CTLA-4]_H3.25_L0.132  (Fab XENP20430, scFv XENP20439) vhCDR3
GGLLGPFDL

SEQ ID NO: 37962 - protein, 108 aa, synthetic construct; identical to SEQ ID NO: 2795
  source 1..108: note = Description of Artificial Sequence: Synthetic polypeptide; note = VL of [CTLA-4]_H3.25_L0.132  (Fab XENP20430, scFv XENP20439)

SEQ ID NO: 37963 - protein, 12 aa, synthetic construct
  source 1..12: note = Description of Artificial Sequence: Synthetic peptide; note = [CTLA-4]_H3.25_L0.132  (Fab XENP20430, scFv XENP20439) vlCDR1
RASQSVSSSYLA

SEQ ID NO: 37964 - protein, 7 aa, synthetic construct
  source 1..7: note = Description of Artificial Sequence: Synthetic peptide; note = [CTLA-4]_H3.25_L0.132  (Fab XENP20430, scFv XENP20439) vlCDR2
GASSRAT

SEQ ID NO: 37965 - protein, 9 aa, synthetic construct
  source 1..9: note = Description of Artificial Sequence: Synthetic peptide; note = [CTLA-4]_H3.25_L0.132  (Fab XENP20430, scFv XENP20439) vlCDR3
QQYGSSPWT

SEQ ID NO: 37966 - protein, 246 aa, synthetic construct; identical to SEQ ID NO: 2910
  source 1..246: note = Description of Artificial Sequence: Synthetic polypeptide; note = scFV of [CTLA-4]_H3.25_L0.132  (Fab XENP20430, scFv XENP20439)

SEQ ID NO: 37967 - protein, 118 aa, synthetic construct; identical to SEQ ID NO: 2461
  source 1..118: note = Description of Artificial Sequence: Synthetic polypeptide; note = VH of [CTLA-4]_H3.4_L0.118  (Fab XENP20341, scFv XENP20378)

SEQ ID NO: 37968 - protein, 5 aa, synthetic construct
  source 1..5: note = Description of Artificial Sequence: Synthetic peptide; note = [CTLA-4]_H3.4_L0.118  (Fab XENP20341, scFv XENP20378) vhCDR1
SYTMH

SEQ ID NO: 37969 - protein, 17 aa, synthetic construct
  source 1..17: note = Description of Artificial Sequence: Synthetic peptide; note = [CTLA-4]_H3.4_L0.118  (Fab XENP20341, scFv XENP20378) vhCDR2
FISYDGNHKYYADSVKG

SEQ ID NO: 37970 - protein, 9 aa, synthetic construct
  source 1..9: note = Description of Artificial Sequence: Synthetic peptide; note = [CTLA-4]_H3.4_L0.118  (Fab XENP20341, scFv XENP20378) vhCDR3
TGHLGPFDL

SEQ ID NO: 37971 - protein, 108 aa, synthetic construct; identical to SEQ ID NO: 2669
  source 1..108: note = Description of Artificial Sequence: Synthetic polypeptide; note = VL of [CTLA-4]_H3.4_L0.118  (Fab XENP20341, scFv XENP20378)

SEQ ID NO: 37972 - protein, 12 aa, synthetic construct
  source 1..12: note = Description of Artificial Sequence: Synthetic peptide; note = [CTLA-4]_H3.4_L0.118  (Fab XENP20341, scFv XENP20378) vlCDR1
RASQSVGSSYLA

SEQ ID NO: 37973 - protein, 7 aa, synthetic construct
  source 1..7: note = Description of Artificial Sequence: Synthetic peptide; note = [CTLA-4]_H3.4_L0.118  (Fab XENP20341, scFv XENP20378) vlCDR2
GAFSRAT

SEQ ID NO: 37974 - protein, 9 aa, synthetic construct
  source 1..9: note = Description of Artificial Sequence: Synthetic peptide; note = [CTLA-4]_H3.4_L0.118  (Fab XENP20341, scFv XENP20378) vlCDR3
QQYGSSPWT

SEQ ID NO: 37975 - protein, 246 aa, synthetic construct; identical to SEQ ID NO: 2667
  source 1..246: note = Description of Artificial Sequence: Synthetic polypeptide; note = scFV of [CTLA-4]_H3.4_L0.118  (Fab XENP20341, scFv XENP20378)

SEQ ID NO: 37976 - protein, 118 aa, synthetic construct; identical to SEQ ID NO: 2461
  source 1..118: note = Description of Artificial Sequence: Synthetic polypeptide; note = VH of [CTLA-4]_H3.4_L0.119  (Fab XENP20342, scFv XENP20379)

SEQ ID NO: 37977 - protein, 5 aa, synthetic construct
  source 1..5: note = Description of Artificial Sequence: Synthetic peptide; note = [CTLA-4]_H3.4_L0.119  (Fab XENP20342, scFv XENP20379) vhCDR1
SYTMH

SEQ ID NO: 37978 - protein, 17 aa, synthetic construct
  source 1..17: note = Description of Artificial Sequence: Synthetic peptide; note = [CTLA-4]_H3.4_L0.119  (Fab XENP20342, scFv XENP20379) vhCDR2
FISYDGNHKYYADSVKG

SEQ ID NO: 37979 - protein, 9 aa, synthetic construct
  source 1..9: note = Description of Artificial Sequence: Synthetic peptide; note = [CTLA-4]_H3.4_L0.119  (Fab XENP20342, scFv XENP20379) vhCDR3
TGHLGPFDL

SEQ ID NO: 37980 - protein, 108 aa, synthetic construct; identical to SEQ ID NO: 23
  source 1..108: note = Description of Artificial Sequence: Synthetic polypeptide; note = VL of [CTLA-4]_H3.4_L0.119  (Fab XENP20342, scFv XENP20379)

SEQ ID NO: 37981 - protein, 12 aa, synthetic construct
  source 1..12: note = Description of Artificial Sequence: Synthetic peptide; note = [CTLA-4]_H3.4_L0.119  (Fab XENP20342, scFv XENP20379) vlCDR1
RASQSVGSSYLA

SEQ ID NO: 37982 - protein, 7 aa, synthetic construct
  source 1..7: note = Description of Artificial Sequence: Synthetic peptide; note = [CTLA-4]_H3.4_L0.119  (Fab XENP20342, scFv XENP20379) vlCDR2
GAFSRAT

SEQ ID NO: 37983 - protein, 9 aa, synthetic construct
  source 1..9: note = Description of Artificial Sequence: Synthetic peptide; note = [CTLA-4]_H3.4_L0.119  (Fab XENP20342, scFv XENP20379) vlCDR3
QQYGSSPWT

SEQ ID NO: 37984 - protein, 246 aa, synthetic construct; identical to SEQ ID NO: 2676
  source 1..246: note = Description of Artificial Sequence: Synthetic polypeptide; note = scFV of [CTLA-4]_H3.4_L0.119  (Fab XENP20342, scFv XENP20379)

SEQ ID NO: 37985 - protein, 118 aa, synthetic construct; identical to SEQ ID NO: 2461
  source 1..118: note = Description of Artificial Sequence: Synthetic polypeptide; note = VH of [CTLA-4]_H3.4_L0.12  (Fab XENP20071, scFv XENP20078)

SEQ ID NO: 37986 - protein, 5 aa, synthetic construct
  source 1..5: note = Description of Artificial Sequence: Synthetic peptide; note = [CTLA-4]_H3.4_L0.12  (Fab XENP20071, scFv XENP20078) vhCDR1
SYTMH

SEQ ID NO: 37987 - protein, 17 aa, synthetic construct
  source 1..17: note = Description of Artificial Sequence: Synthetic peptide; note = [CTLA-4]_H3.4_L0.12  (Fab XENP20071, scFv XENP20078) vhCDR2
FISYDGNHKYYADSVKG

SEQ ID NO: 37988 - protein, 9 aa, synthetic construct
  source 1..9: note = Description of Artificial Sequence: Synthetic peptide; note = [CTLA-4]_H3.4_L0.12  (Fab XENP20071, scFv XENP20078) vhCDR3
TGHLGPFDL

SEQ ID NO: 37989 - protein, 108 aa, synthetic construct; identical to SEQ ID NO: 1517
  source 1..108: note = Description of Artificial Sequence: Synthetic polypeptide; note = VL of [CTLA-4]_H3.4_L0.12  (Fab XENP20071, scFv XENP20078)

SEQ ID NO: 37990 - protein, 12 aa, synthetic construct
  source 1..12: note = Description of Artificial Sequence: Synthetic peptide; note = [CTLA-4]_H3.4_L0.12  (Fab XENP20071, scFv XENP20078) vlCDR1
RASQSVGSSYLA

SEQ ID NO: 37991 - protein, 7 aa, synthetic construct
  source 1..7: note = Description of Artificial Sequence: Synthetic peptide; note = [CTLA-4]_H3.4_L0.12  (Fab XENP20071, scFv XENP20078) vlCDR2
GAFSRAT

SEQ ID NO: 37992 - protein, 9 aa, synthetic construct
  source 1..9: note = Description of Artificial Sequence: Synthetic peptide; note = [CTLA-4]_H3.4_L0.12  (Fab XENP20071, scFv XENP20078) vlCDR3
QQYGSSPWT

SEQ ID NO: 37993 - protein, 246 aa, synthetic construct; identical to SEQ ID NO: 2460
  source 1..246: note = Description of Artificial Sequence: Synthetic polypeptide; note = scFV of [CTLA-4]_H3.4_L0.12  (Fab XENP20071, scFv XENP20078)

SEQ ID NO: 37994 - protein, 118 aa, synthetic construct; identical to SEQ ID NO: 2461
  source 1..118: note = Description of Artificial Sequence: Synthetic polypeptide; note = VH of [CTLA-4]_H3.4_L0.121  (Fab XENP20344, scFv XENP20381)

SEQ ID NO: 37995 - protein, 5 aa, synthetic construct
  source 1..5: note = Description of Artificial Sequence: Synthetic peptide; note = [CTLA-4]_H3.4_L0.121  (Fab XENP20344, scFv XENP20381) vhCDR1
SYTMH

SEQ ID NO: 37996 - protein, 17 aa, synthetic construct
  source 1..17: note = Description of Artificial Sequence: Synthetic peptide; note = [CTLA-4]_H3.4_L0.121  (Fab XENP20344, scFv XENP20381) vhCDR2
FISYDGNHKYYADSVKG

SEQ ID NO: 37997 - protein, 9 aa, synthetic construct
  source 1..9: note = Description of Artificial Sequence: Synthetic peptide; note = [CTLA-4]_H3.4_L0.121  (Fab XENP20344, scFv XENP20381) vhCDR3
TGHLGPFDL

SEQ ID NO: 37998 - protein, 108 aa, synthetic construct; identical to SEQ ID NO: 2696
  source 1..108: note = Description of Artificial Sequence: Synthetic polypeptide; note = VL of [CTLA-4]_H3.4_L0.121  (Fab XENP20344, scFv XENP20381)

SEQ ID NO: 37999 - protein, 12 aa, synthetic construct
  source 1..12: note = Description of Artificial Sequence: Synthetic peptide; note = [CTLA-4]_H3.4_L0.121  (Fab XENP20344, scFv XENP20381) vlCDR1
RASQSVGSSYLA

SEQ ID NO: 38000 - protein, 7 aa, synthetic construct
  source 1..7: note = Description of Artificial Sequence: Synthetic peptide; note = [CTLA-4]_H3.4_L0.121  (Fab XENP20344, scFv XENP20381) vlCDR2
GASSRAT

SEQ ID NO: 38001 - protein, 9 aa, synthetic construct
  source 1..9: note = Description of Artificial Sequence: Synthetic peptide; note = [CTLA-4]_H3.4_L0.121  (Fab XENP20344, scFv XENP20381) vlCDR3
QQYGSSPWT

SEQ ID NO: 38002 - protein, 246 aa, synthetic construct; identical to SEQ ID NO: 2694
  source 1..246: note = Description of Artificial Sequence: Synthetic polypeptide; note = scFV of [CTLA-4]_H3.4_L0.121  (Fab XENP20344, scFv XENP20381)

SEQ ID NO: 38003 - protein, 118 aa, synthetic construct; identical to SEQ ID NO: 2461
  source 1..118: note = Description of Artificial Sequence: Synthetic polypeptide; note = VH of [CTLA-4]_H3.4_L0.122  (Fab XENP20345, scFv XENP20382)

SEQ ID NO: 38004 - protein, 5 aa, synthetic construct
  source 1..5: note = Description of Artificial Sequence: Synthetic peptide; note = [CTLA-4]_H3.4_L0.122  (Fab XENP20345, scFv XENP20382) vhCDR1
SYTMH

SEQ ID NO: 38005 - protein, 17 aa, synthetic construct
  source 1..17: note = Description of Artificial Sequence: Synthetic peptide; note = [CTLA-4]_H3.4_L0.122  (Fab XENP20345, scFv XENP20382) vhCDR2
FISYDGNHKYYADSVKG

SEQ ID NO: 38006 - protein, 9 aa, synthetic construct
  source 1..9: note = Description of Artificial Sequence: Synthetic peptide; note = [CTLA-4]_H3.4_L0.122  (Fab XENP20345, scFv XENP20382) vhCDR3
TGHLGPFDL

SEQ ID NO: 38007 - protein, 108 aa, synthetic construct; identical to SEQ ID NO: 1481
  source 1..108: note = Description of Artificial Sequence: Synthetic polypeptide; note = VL of [CTLA-4]_H3.4_L0.122  (Fab XENP20345, scFv XENP20382)

SEQ ID NO: 38008 - protein, 12 aa, synthetic construct
  source 1..12: note = Description of Artificial Sequence: Synthetic peptide; note = [CTLA-4]_H3.4_L0.122  (Fab XENP20345, scFv XENP20382) vlCDR1
RASQSVGSSYLA

SEQ ID NO: 38009 - protein, 7 aa, synthetic construct
  source 1..7: note = Description of Artificial Sequence: Synthetic peptide; note = [CTLA-4]_H3.4_L0.122  (Fab XENP20345, scFv XENP20382) vlCDR2
GAFSRAT

SEQ ID NO: 38010 - protein, 9 aa, synthetic construct
  source 1..9: note = Description of Artificial Sequence: Synthetic peptide; note = [CTLA-4]_H3.4_L0.122  (Fab XENP20345, scFv XENP20382) vlCDR3
QQYGSSPWT

SEQ ID NO: 38011 - protein, 246 aa, synthetic construct; identical to SEQ ID NO: 2703
  source 1..246: note = Description of Artificial Sequence: Synthetic polypeptide; note = scFV of [CTLA-4]_H3.4_L0.122  (Fab XENP20345, scFv XENP20382)

SEQ ID NO: 38012 - protein, 118 aa, synthetic construct; identical to SEQ ID NO: 2461
  source 1..118: note = Description of Artificial Sequence: Synthetic polypeptide; note = VH of [CTLA-4]_H3.4_L0.123  (Fab XENP20346, scFv XENP20383)

SEQ ID NO: 38013 - protein, 5 aa, synthetic construct
  source 1..5: note = Description of Artificial Sequence: Synthetic peptide; note = [CTLA-4]_H3.4_L0.123  (Fab XENP20346, scFv XENP20383) vhCDR1
SYTMH

SEQ ID NO: 38014 - protein, 17 aa, synthetic construct
  source 1..17: note = Description of Artificial Sequence: Synthetic peptide; note = [CTLA-4]_H3.4_L0.123  (Fab XENP20346, scFv XENP20383) vhCDR2
FISYDGNHKYYADSVKG

SEQ ID NO: 38015 - protein, 9 aa, synthetic construct
  source 1..9: note = Description of Artificial Sequence: Synthetic peptide; note = [CTLA-4]_H3.4_L0.123  (Fab XENP20346, scFv XENP20383) vhCDR3
TGHLGPFDL

SEQ ID NO: 38016 - protein, 108 aa, synthetic construct; identical to SEQ ID NO: 2714
  source 1..108: note = Description of Artificial Sequence: Synthetic polypeptide; note = VL of [CTLA-4]_H3.4_L0.123  (Fab XENP20346, scFv XENP20383)

SEQ ID NO: 38017 - protein, 12 aa, synthetic construct
  source 1..12: note = Description of Artificial Sequence: Synthetic peptide; note = [CTLA-4]_H3.4_L0.123  (Fab XENP20346, scFv XENP20383) vlCDR1
RASQSVSSSYLA

SEQ ID NO: 38018 - protein, 7 aa, synthetic construct
  source 1..7: note = Description of Artificial Sequence: Synthetic peptide; note = [CTLA-4]_H3.4_L0.123  (Fab XENP20346, scFv XENP20383) vlCDR2
GAFSRAT

SEQ ID NO: 38019 - protein, 9 aa, synthetic construct
  source 1..9: note = Description of Artificial Sequence: Synthetic peptide; note = [CTLA-4]_H3.4_L0.123  (Fab XENP20346, scFv XENP20383) vlCDR3
QQYGSSPWT

SEQ ID NO: 38020 - protein, 246 aa, synthetic construct; identical to SEQ ID NO: 2712
  source 1..246: note = Description of Artificial Sequence: Synthetic polypeptide; note = scFV of [CTLA-4]_H3.4_L0.123  (Fab XENP20346, scFv XENP20383)

SEQ ID NO: 38021 - protein, 118 aa, synthetic construct; identical to SEQ ID NO: 2461
  source 1..118: note = Description of Artificial Sequence: Synthetic polypeptide; note = VH of [CTLA-4]_H3.4_L0.124  (Fab XENP20347, scFv XENP20384)

SEQ ID NO: 38022 - protein, 5 aa, synthetic construct
  source 1..5: note = Description of Artificial Sequence: Synthetic peptide; note = [CTLA-4]_H3.4_L0.124  (Fab XENP20347, scFv XENP20384) vhCDR1
SYTMH

SEQ ID NO: 38023 - protein, 17 aa, synthetic construct
  source 1..17: note = Description of Artificial Sequence: Synthetic peptide; note = [CTLA-4]_H3.4_L0.124  (Fab XENP20347, scFv XENP20384) vhCDR2
FISYDGNHKYYADSVKG

SEQ ID NO: 38024 - protein, 9 aa, synthetic construct
  source 1..9: note = Description of Artificial Sequence: Synthetic peptide; note = [CTLA-4]_H3.4_L0.124  (Fab XENP20347, scFv XENP20384) vhCDR3
TGHLGPFDL

SEQ ID NO: 38025 - protein, 108 aa, synthetic construct; identical to SEQ ID NO: 2723
  source 1..108: note = Description of Artificial Sequence: Synthetic polypeptide; note = VL of [CTLA-4]_H3.4_L0.124  (Fab XENP20347, scFv XENP20384)

SEQ ID NO: 38026 - protein, 12 aa, synthetic construct
  source 1..12: note = Description of Artificial Sequence: Synthetic peptide; note = [CTLA-4]_H3.4_L0.124  (Fab XENP20347, scFv XENP20384) vlCDR1
RASQSVGSSYLA

SEQ ID NO: 38027 - protein, 7 aa, synthetic construct
  source 1..7: note = Description of Artificial Sequence: Synthetic peptide; note = [CTLA-4]_H3.4_L0.124  (Fab XENP20347, scFv XENP20384) vlCDR2
GASSRAT

SEQ ID NO: 38028 - protein, 9 aa, synthetic construct
  source 1..9: note = Description of Artificial Sequence: Synthetic peptide; note = [CTLA-4]_H3.4_L0.124  (Fab XENP20347, scFv XENP20384) vlCDR3
QQYGSSPWT

SEQ ID NO: 38029 - protein, 246 aa, synthetic construct; identical to SEQ ID NO: 2721
  source 1..246: note = Description of Artificial Sequence: Synthetic polypeptide; note = scFV of [CTLA-4]_H3.4_L0.124  (Fab XENP20347, scFv XENP20384)

SEQ ID NO: 38030 - protein, 118 aa, synthetic construct; identical to SEQ ID NO: 2461
  source 1..118: note = Description of Artificial Sequence: Synthetic polypeptide; note = VH of [CTLA-4]_H3.4_L0.125  (Fab XENP20348, scFv XENP20385)

SEQ ID NO: 38031 - protein, 5 aa, synthetic construct
  source 1..5: note = Description of Artificial Sequence: Synthetic peptide; note = [CTLA-4]_H3.4_L0.125  (Fab XENP20348, scFv XENP20385) vhCDR1
SYTMH

SEQ ID NO: 38032 - protein, 17 aa, synthetic construct
  source 1..17: note = Description of Artificial Sequence: Synthetic peptide; note = [CTLA-4]_H3.4_L0.125  (Fab XENP20348, scFv XENP20385) vhCDR2
FISYDGNHKYYADSVKG

SEQ ID NO: 38033 - protein, 9 aa, synthetic construct
  source 1..9: note = Description of Artificial Sequence: Synthetic peptide; note = [CTLA-4]_H3.4_L0.125  (Fab XENP20348, scFv XENP20385) vhCDR3
TGHLGPFDL

SEQ ID NO: 38034 - protein, 108 aa, synthetic construct; identical to SEQ ID NO: 1607
  source 1..108: note = Description of Artificial Sequence: Synthetic polypeptide; note = VL of [CTLA-4]_H3.4_L0.125  (Fab XENP20348, scFv XENP20385)

SEQ ID NO: 38035 - protein, 12 aa, synthetic construct
  source 1..12: note = Description of Artificial Sequence: Synthetic peptide; note = [CTLA-4]_H3.4_L0.125  (Fab XENP20348, scFv XENP20385) vlCDR1
RASQSVSSSYLA

SEQ ID NO: 38036 - protein, 7 aa, synthetic construct
  source 1..7: note = Description of Artificial Sequence: Synthetic peptide; note = [CTLA-4]_H3.4_L0.125  (Fab XENP20348, scFv XENP20385) vlCDR2
GAFSRAT

SEQ ID NO: 38037 - protein, 9 aa, synthetic construct
  source 1..9: note = Description of Artificial Sequence: Synthetic peptide; note = [CTLA-4]_H3.4_L0.125  (Fab XENP20348, scFv XENP20385) vlCDR3
QQYGSSPWT

SEQ ID NO: 38038 - protein, 246 aa, synthetic construct; identical to SEQ ID NO: 2730
  source 1..246: note = Description of Artificial Sequence: Synthetic polypeptide; note = scFV of [CTLA-4]_H3.4_L0.125  (Fab XENP20348, scFv XENP20385)

SEQ ID NO: 38039 - protein, 118 aa, synthetic construct; identical to SEQ ID NO: 2461
  source 1..118: note = Description of Artificial Sequence: Synthetic polypeptide; note = VH of [CTLA-4]_H3.4_L0.126  (Fab XENP20349, scFv XENP20386)

SEQ ID NO: 38040 - protein, 5 aa, synthetic construct
  source 1..5: note = Description of Artificial Sequence: Synthetic peptide; note = [CTLA-4]_H3.4_L0.126  (Fab XENP20349, scFv XENP20386) vhCDR1
SYTMH

SEQ ID NO: 38041 - protein, 17 aa, synthetic construct
  source 1..17: note = Description of Artificial Sequence: Synthetic peptide; note = [CTLA-4]_H3.4_L0.126  (Fab XENP20349, scFv XENP20386) vhCDR2
FISYDGNHKYYADSVKG

SEQ ID NO: 38042 - protein, 9 aa, synthetic construct
  source 1..9: note = Description of Artificial Sequence: Synthetic peptide; note = [CTLA-4]_H3.4_L0.126  (Fab XENP20349, scFv XENP20386) vhCDR3
TGHLGPFDL

SEQ ID NO: 38043 - protein, 108 aa, synthetic construct; identical to SEQ ID NO: 2066
  source 1..108: note = Description of Artificial Sequence: Synthetic polypeptide; note = VL of [CTLA-4]_H3.4_L0.126  (Fab XENP20349, scFv XENP20386)

SEQ ID NO: 38044 - protein, 12 aa, synthetic construct
  source 1..12: note = Description of Artificial Sequence: Synthetic peptide; note = [CTLA-4]_H3.4_L0.126  (Fab XENP20349, scFv XENP20386) vlCDR1
RASQSVGSSYLA

SEQ ID NO: 38045 - protein, 7 aa, synthetic construct
  source 1..7: note = Description of Artificial Sequence: Synthetic peptide; note = [CTLA-4]_H3.4_L0.126  (Fab XENP20349, scFv XENP20386) vlCDR2
GASSRAT

SEQ ID NO: 38046 - protein, 9 aa, synthetic construct
  source 1..9: note = Description of Artificial Sequence: Synthetic peptide; note = [CTLA-4]_H3.4_L0.126  (Fab XENP20349, scFv XENP20386) vlCDR3
QQYGSSPWT

SEQ ID NO: 38047 - protein, 246 aa, synthetic construct; identical to SEQ ID NO: 2739
  source 1..246: note = Description of Artificial Sequence: Synthetic polypeptide; note = scFV of [CTLA-4]_H3.4_L0.126  (Fab XENP20349, scFv XENP20386)

SEQ ID NO: 38048 - protein, 118 aa, synthetic construct; identical to SEQ ID NO: 2461
  source 1..118: note = Description of Artificial Sequence: Synthetic polypeptide; note = VH of [CTLA-4]_H3.4_L0.127  (Fab XENP20350, scFv XENP20387)

SEQ ID NO: 38049 - protein, 5 aa, synthetic construct
  source 1..5: note = Description of Artificial Sequence: Synthetic peptide; note = [CTLA-4]_H3.4_L0.127  (Fab XENP20350, scFv XENP20387) vhCDR1
SYTMH

SEQ ID NO: 38050 - protein, 17 aa, synthetic construct
  source 1..17: note = Description of Artificial Sequence: Synthetic peptide; note = [CTLA-4]_H3.4_L0.127  (Fab XENP20350, scFv XENP20387) vhCDR2
FISYDGNHKYYADSVKG

SEQ ID NO: 38051 - protein, 9 aa, synthetic construct
  source 1..9: note = Description of Artificial Sequence: Synthetic peptide; note = [CTLA-4]_H3.4_L0.127  (Fab XENP20350, scFv XENP20387) vhCDR3
TGHLGPFDL

SEQ ID NO: 38052 - protein, 108 aa, synthetic construct; identical to SEQ ID NO: 2750
  source 1..108: note = Description of Artificial Sequence: Synthetic polypeptide; note = VL of [CTLA-4]_H3.4_L0.127  (Fab XENP20350, scFv XENP20387)

SEQ ID NO: 38053 - protein, 12 aa, synthetic construct
  source 1..12: note = Description of Artificial Sequence: Synthetic peptide; note = [CTLA-4]_H3.4_L0.127  (Fab XENP20350, scFv XENP20387) vlCDR1
RASQSVSSSYLA

SEQ ID NO: 38054 - protein, 7 aa, synthetic construct
  source 1..7: note = Description of Artificial Sequence: Synthetic peptide; note = [CTLA-4]_H3.4_L0.127  (Fab XENP20350, scFv XENP20387) vlCDR2
GASSRAT

SEQ ID NO: 38055 - protein, 9 aa, synthetic construct
  source 1..9: note = Description of Artificial Sequence: Synthetic peptide; note = [CTLA-4]_H3.4_L0.127  (Fab XENP20350, scFv XENP20387) vlCDR3
QQYGSSPWT

SEQ ID NO: 38056 - protein, 246 aa, synthetic construct; identical to SEQ ID NO: 2748
  source 1..246: note = Description of Artificial Sequence: Synthetic polypeptide; note = scFV of [CTLA-4]_H3.4_L0.127  (Fab XENP20350, scFv XENP20387)

SEQ ID NO: 38057 - protein, 118 aa, synthetic construct; identical to SEQ ID NO: 2461
  source 1..118: note = Description of Artificial Sequence: Synthetic polypeptide; note = VH of [CTLA-4]_H3.4_L0.128  (Fab XENP20351, scFv XENP20388)

SEQ ID NO: 38058 - protein, 5 aa, synthetic construct
  source 1..5: note = Description of Artificial Sequence: Synthetic peptide; note = [CTLA-4]_H3.4_L0.128  (Fab XENP20351, scFv XENP20388) vhCDR1
SYTMH

SEQ ID NO: 38059 - protein, 17 aa, synthetic construct
  source 1..17: note = Description of Artificial Sequence: Synthetic peptide; note = [CTLA-4]_H3.4_L0.128  (Fab XENP20351, scFv XENP20388) vhCDR2
FISYDGNHKYYADSVKG

SEQ ID NO: 38060 - protein, 9 aa, synthetic construct
  source 1..9: note = Description of Artificial Sequence: Synthetic peptide; note = [CTLA-4]_H3.4_L0.128  (Fab XENP20351, scFv XENP20388) vhCDR3
TGHLGPFDL

SEQ ID NO: 38061 - protein, 108 aa, synthetic construct; identical to SEQ ID NO: 2759
  source 1..108: note = Description of Artificial Sequence: Synthetic polypeptide; note = VL of [CTLA-4]_H3.4_L0.128  (Fab XENP20351, scFv XENP20388)

SEQ ID NO: 38062 - protein, 12 aa, synthetic construct
  source 1..12: note = Description of Artificial Sequence: Synthetic peptide; note = [CTLA-4]_H3.4_L0.128  (Fab XENP20351, scFv XENP20388) vlCDR1
RASQSVSSSYLA

SEQ ID NO: 38063 - protein, 7 aa, synthetic construct
  source 1..7: note = Description of Artificial Sequence: Synthetic peptide; note = [CTLA-4]_H3.4_L0.128  (Fab XENP20351, scFv XENP20388) vlCDR2
GAFSRAT

SEQ ID NO: 38064 - protein, 9 aa, synthetic construct
  source 1..9: note = Description of Artificial Sequence: Synthetic peptide; note = [CTLA-4]_H3.4_L0.128  (Fab XENP20351, scFv XENP20388) vlCDR3
QQYGSSPWT

SEQ ID NO: 38065 - protein, 246 aa, synthetic construct; identical to SEQ ID NO: 2757
  source 1..246: note = Description of Artificial Sequence: Synthetic polypeptide; note = scFV of [CTLA-4]_H3.4_L0.128  (Fab XENP20351, scFv XENP20388)

SEQ ID NO: 38066 - protein, 118 aa, synthetic construct; identical to SEQ ID NO: 2461
  source 1..118: note = Description of Artificial Sequence: Synthetic polypeptide; note = VL of [CTLA-4]_H3.4_l0.129  (Fab XENP20352, scFv XENP20389)

SEQ ID NO: 38067 - protein, 5 aa, synthetic construct
  source 1..5: note = Description of Artificial Sequence: Synthetic peptide; note = [CTLA-4]_H3.4_l0.129  (Fab XENP20352, scFv XENP20389) vlCDR1
SYTMH

SEQ ID NO: 38068 - protein, 17 aa, synthetic construct
  source 1..17: note = Description of Artificial Sequence: Synthetic peptide; note = [CTLA-4]_H3.4_l0.129  (Fab XENP20352, scFv XENP20389) vlCDR2
FISYDGNHKYYADSVKG

SEQ ID NO: 38069 - protein, 9 aa, synthetic construct
  source 1..9: note = Description of Artificial Sequence: Synthetic peptide; note = [CTLA-4]_H3.4_l0.129  (Fab XENP20352, scFv XENP20389) vlCDR3
TGHLGPFDL

SEQ ID NO: 38070 - protein, 246 aa, synthetic construct; identical to SEQ ID NO: 2766
  source 1..246: note = Description of Artificial Sequence: Synthetic polypeptide; note = scFV of [CTLA-4]_H3.4_l0.129  (Fab XENP20352, scFv XENP20389)

SEQ ID NO: 38071 - protein, 118 aa, synthetic construct; identical to SEQ ID NO: 2461
  source 1..118: note = Description of Artificial Sequence: Synthetic polypeptide; note = VH of [CTLA-4]_H3.4_L0.130 (Fab XENP20353, scFv XENP20390)

SEQ ID NO: 38072 - protein, 5 aa, synthetic construct
  source 1..5: note = Description of Artificial Sequence: Synthetic peptide; note = [CTLA-4]_H3.4_L0.130 (Fab XENP20353, scFv XENP20390) vhCDR1
SYTMH

SEQ ID NO: 38073 - protein, 17 aa, synthetic construct
  source 1..17: note = Description of Artificial Sequence: Synthetic peptide; note = [CTLA-4]_H3.4_L0.130 (Fab XENP20353, scFv XENP20390) vhCDR2
FISYDGNHKYYADSVKG

SEQ ID NO: 38074 - protein, 9 aa, synthetic construct
  source 1..9: note = Description of Artificial Sequence: Synthetic peptide; note = [CTLA-4]_H3.4_L0.130 (Fab XENP20353, scFv XENP20390) vhCDR3
TGHLGPFDL

SEQ ID NO: 38075 - protein, 108 aa, synthetic construct; identical to SEQ ID NO: 2777
  source 1..108: note = Description of Artificial Sequence: Synthetic polypeptide; note = VL of [CTLA-4]_H3.4_L0.130 (Fab XENP20353, scFv XENP20390)

SEQ ID NO: 38076 - protein, 12 aa, synthetic construct
  source 1..12: note = Description of Artificial Sequence: Synthetic peptide; note = [CTLA-4]_H3.4_L0.130 (Fab XENP20353, scFv XENP20390) vlCDR1
RASQSVSSSYLA

SEQ ID NO: 38077 - protein, 7 aa, synthetic construct
  source 1..7: note = Description of Artificial Sequence: Synthetic peptide; note = [CTLA-4]_H3.4_L0.130 (Fab XENP20353, scFv XENP20390) vlCDR2
GASSRAT

SEQ ID NO: 38078 - protein, 9 aa, synthetic construct
  source 1..9: note = Description of Artificial Sequence: Synthetic peptide; note = [CTLA-4]_H3.4_L0.130 (Fab XENP20353, scFv XENP20390) vlCDR3
QQYGSSPWT

SEQ ID NO: 38079 - protein, 246 aa, synthetic construct; identical to SEQ ID NO: 2775
  source 1..246: note = Description of Artificial Sequence: Synthetic polypeptide; note = scFV of [CTLA-4]_H3.4_L0.130 (Fab XENP20353, scFv XENP20390)

SEQ ID NO: 38080 - protein, 118 aa, synthetic construct; identical to SEQ ID NO: 2461
  source 1..118: note = Description of Artificial Sequence: Synthetic polypeptide; note = VH of [CTLA-4]_H3.4_L0.131 (Fab XENP20354, scFv XENP20391)

SEQ ID NO: 38081 - protein, 5 aa, synthetic construct
  source 1..5: note = Description of Artificial Sequence: Synthetic peptide; note = [CTLA-4]_H3.4_L0.131 (Fab XENP20354, scFv XENP20391) vhCDR1
SYTMH

SEQ ID NO: 38082 - protein, 17 aa, synthetic construct
  source 1..17: note = Description of Artificial Sequence: Synthetic peptide; note = [CTLA-4]_H3.4_L0.131 (Fab XENP20354, scFv XENP20391) vhCDR2
FISYDGNHKYYADSVKG

SEQ ID NO: 38083 - protein, 9 aa, synthetic construct
  source 1..9: note = Description of Artificial Sequence: Synthetic peptide; note = [CTLA-4]_H3.4_L0.131 (Fab XENP20354, scFv XENP20391) vhCDR3
TGHLGPFDL

SEQ ID NO: 38084 - protein, 108 aa, synthetic construct; identical to SEQ ID NO: 2786
  source 1..108: note = Description of Artificial Sequence: Synthetic polypeptide; note = VL of [CTLA-4]_H3.4_L0.131 (Fab XENP20354, scFv XENP20391)

SEQ ID NO: 38085 - protein, 12 aa, synthetic construct
  source 1..12: note = Description of Artificial Sequence: Synthetic peptide; note = [CTLA-4]_H3.4_L0.131 (Fab XENP20354, scFv XENP20391) vlCDR1
RASQSVSSSYLA

SEQ ID NO: 38086 - protein, 7 aa, synthetic construct
  source 1..7: note = Description of Artificial Sequence: Synthetic peptide; note = [CTLA-4]_H3.4_L0.131 (Fab XENP20354, scFv XENP20391) vlCDR2
GASSRAT

SEQ ID NO: 38087 - protein, 9 aa, synthetic construct
  source 1..9: note = Description of Artificial Sequence: Synthetic peptide; note = [CTLA-4]_H3.4_L0.131 (Fab XENP20354, scFv XENP20391) vlCDR3
QQYGSSPWT

SEQ ID NO: 38088 - protein, 246 aa, synthetic construct; identical to SEQ ID NO: 2784
  source 1..246: note = Description of Artificial Sequence: Synthetic polypeptide; note = scFV of [CTLA-4]_H3.4_L0.131 (Fab XENP20354, scFv XENP20391)

SEQ ID NO: 38089 - protein, 118 aa, synthetic construct; identical to SEQ ID NO: 2461
  source 1..118: note = Description of Artificial Sequence: Synthetic polypeptide; note = VH of [CTLA-4]_H3.4_L0.132  (Fab XENP20355, scFv XENP20392)

SEQ ID NO: 38090 - protein, 5 aa, synthetic construct
  source 1..5: note = Description of Artificial Sequence: Synthetic peptide; note = [CTLA-4]_H3.4_L0.132  (Fab XENP20355, scFv XENP20392) vhCDR1
SYTMH

SEQ ID NO: 38091 - protein, 17 aa, synthetic construct
  source 1..17: note = Description of Artificial Sequence: Synthetic peptide; note = [CTLA-4]_H3.4_L0.132  (Fab XENP20355, scFv XENP20392) vhCDR2
FISYDGNHKYYADSVKG

SEQ ID NO: 38092 - protein, 9 aa, synthetic construct
  source 1..9: note = Description of Artificial Sequence: Synthetic peptide; note = [CTLA-4]_H3.4_L0.132  (Fab XENP20355, scFv XENP20392) vhCDR3
TGHLGPFDL

SEQ ID NO: 38093 - protein, 108 aa, synthetic construct; identical to SEQ ID NO: 2795
  source 1..108: note = Description of Artificial Sequence: Synthetic polypeptide; note = VL of [CTLA-4]_H3.4_L0.132  (Fab XENP20355, scFv XENP20392)

SEQ ID NO: 38094 - protein, 12 aa, synthetic construct
  source 1..12: note = Description of Artificial Sequence: Synthetic peptide; note = [CTLA-4]_H3.4_L0.132  (Fab XENP20355, scFv XENP20392) vlCDR1
RASQSVSSSYLA

SEQ ID NO: 38095 - protein, 7 aa, synthetic construct
  source 1..7: note = Description of Artificial Sequence: Synthetic peptide; note = [CTLA-4]_H3.4_L0.132  (Fab XENP20355, scFv XENP20392) vlCDR2
GASSRAT

SEQ ID NO: 38096 - protein, 9 aa, synthetic construct
  source 1..9: note = Description of Artificial Sequence: Synthetic peptide; note = [CTLA-4]_H3.4_L0.132  (Fab XENP20355, scFv XENP20392) vlCDR3
QQYGSSPWT

SEQ ID NO: 38097 - protein, 246 aa, synthetic construct; identical to SEQ ID NO: 2793
  source 1..246: note = Description of Artificial Sequence: Synthetic polypeptide; note = scFV of [CTLA-4]_H3.4_L0.132  (Fab XENP20355, scFv XENP20392)

SEQ ID NO: 38098 - protein, 118 aa, synthetic construct; identical to SEQ ID NO: 2470
  source 1..118: note = Description of Artificial Sequence: Synthetic polypeptide; note = VH of [CTLA-4]_H3.5_L2.1  (Fab XENP20357, scFv XENP20394)

SEQ ID NO: 38099 - protein, 5 aa, synthetic construct
  source 1..5: note = Description of Artificial Sequence: Synthetic peptide; note = [CTLA-4]_H3.5_L2.1  (Fab XENP20357, scFv XENP20394) vhCDR1
SYTMH

SEQ ID NO: 38100 - protein, 17 aa, synthetic construct
  source 1..17: note = Description of Artificial Sequence: Synthetic peptide; note = [CTLA-4]_H3.5_L2.1  (Fab XENP20357, scFv XENP20394) vhCDR2
FISYDGNTKYYADSVKG

SEQ ID NO: 38101 - protein, 9 aa, synthetic construct
  source 1..9: note = Description of Artificial Sequence: Synthetic peptide; note = [CTLA-4]_H3.5_L2.1  (Fab XENP20357, scFv XENP20394) vhCDR3
TGHLGPFDL

SEQ ID NO: 38102 - protein, 108 aa, synthetic construct; identical to SEQ ID NO: 2813
  source 1..108: note = Description of Artificial Sequence: Synthetic polypeptide; note = VL of [CTLA-4]_H3.5_L2.1  (Fab XENP20357, scFv XENP20394)

SEQ ID NO: 38103 - protein, 12 aa, synthetic construct
  source 1..12: note = Description of Artificial Sequence: Synthetic peptide; note = [CTLA-4]_H3.5_L2.1  (Fab XENP20357, scFv XENP20394) vlCDR1
RASQSVSSSYLA

SEQ ID NO: 38104 - protein, 7 aa, synthetic construct
  source 1..7: note = Description of Artificial Sequence: Synthetic peptide; note = [CTLA-4]_H3.5_L2.1  (Fab XENP20357, scFv XENP20394) vlCDR2
GAFSRAT

SEQ ID NO: 38105 - protein, 9 aa, synthetic construct
  source 1..9: note = Description of Artificial Sequence: Synthetic peptide; note = [CTLA-4]_H3.5_L2.1  (Fab XENP20357, scFv XENP20394) vlCDR3
QQYGSSPWT

SEQ ID NO: 38106 - protein, 246 aa, synthetic construct; identical to SEQ ID NO: 2811
  source 1..246: note = Description of Artificial Sequence: Synthetic polypeptide; note = scFV of [CTLA-4]_H3.5_L2.1  (Fab XENP20357, scFv XENP20394)

SEQ ID NO: 38107 - protein, 118 aa, synthetic construct; identical to SEQ ID NO: 2470
  source 1..118: note = Description of Artificial Sequence: Synthetic polypeptide; note = VH of [CTLA-4]_H3.5_L2.2  (Fab XENP20358, scFv XENP20395)

SEQ ID NO: 38108 - protein, 5 aa, synthetic construct
  source 1..5: note = Description of Artificial Sequence: Synthetic peptide; note = [CTLA-4]_H3.5_L2.2  (Fab XENP20358, scFv XENP20395) vhCDR1
SYTMH

SEQ ID NO: 38109 - protein, 17 aa, synthetic construct
  source 1..17: note = Description of Artificial Sequence: Synthetic peptide; note = [CTLA-4]_H3.5_L2.2  (Fab XENP20358, scFv XENP20395) vhCDR2
FISYDGNTKYYADSVKG

SEQ ID NO: 38110 - protein, 9 aa, synthetic construct
  source 1..9: note = Description of Artificial Sequence: Synthetic peptide; note = [CTLA-4]_H3.5_L2.2  (Fab XENP20358, scFv XENP20395) vhCDR3
TGHLGPFDL

SEQ ID NO: 38111 - protein, 108 aa, synthetic construct; identical to SEQ ID NO: 2822
  source 1..108: note = Description of Artificial Sequence: Synthetic polypeptide; note = VL of [CTLA-4]_H3.5_L2.2  (Fab XENP20358, scFv XENP20395)

SEQ ID NO: 38112 - protein, 12 aa, synthetic construct
  source 1..12: note = Description of Artificial Sequence: Synthetic peptide; note = [CTLA-4]_H3.5_L2.2  (Fab XENP20358, scFv XENP20395) vlCDR1
RASQSVGSSYLA

SEQ ID NO: 38113 - protein, 7 aa, synthetic construct
  source 1..7: note = Description of Artificial Sequence: Synthetic peptide; note = [CTLA-4]_H3.5_L2.2  (Fab XENP20358, scFv XENP20395) vlCDR2
GASSRAT

SEQ ID NO: 38114 - protein, 9 aa, synthetic construct
  source 1..9: note = Description of Artificial Sequence: Synthetic peptide; note = [CTLA-4]_H3.5_L2.2  (Fab XENP20358, scFv XENP20395) vlCDR3
QQYGSSPWT

SEQ ID NO: 38115 - protein, 246 aa, synthetic construct; identical to SEQ ID NO: 2820
  source 1..246: note = Description of Artificial Sequence: Synthetic polypeptide; note = scFV of [CTLA-4]_H3.5_L2.2  (Fab XENP20358, scFv XENP20395)

SEQ ID NO: 38116 - protein, 118 aa, synthetic construct; identical to SEQ ID NO: 2470
  source 1..118: note = Description of Artificial Sequence: Synthetic polypeptide; note = VH of [CTLA-4]_H3.5_L2.3  (Fab XENP20359, scFv XENP20396)

SEQ ID NO: 38117 - protein, 5 aa, synthetic construct
  source 1..5: note = Description of Artificial Sequence: Synthetic peptide; note = [CTLA-4]_H3.5_L2.3  (Fab XENP20359, scFv XENP20396) vhCDR1
SYTMH

SEQ ID NO: 38118 - protein, 17 aa, synthetic construct
  source 1..17: note = Description of Artificial Sequence: Synthetic peptide; note = [CTLA-4]_H3.5_L2.3  (Fab XENP20359, scFv XENP20396) vhCDR2
FISYDGNTKYYADSVKG

SEQ ID NO: 38119 - protein, 9 aa, synthetic construct
  source 1..9: note = Description of Artificial Sequence: Synthetic peptide; note = [CTLA-4]_H3.5_L2.3  (Fab XENP20359, scFv XENP20396) vhCDR3
TGHLGPFDL

SEQ ID NO: 38120 - protein, 108 aa, synthetic construct; identical to SEQ ID NO: 2831
  source 1..108: note = Description of Artificial Sequence: Synthetic polypeptide; note = VL of [CTLA-4]_H3.5_L2.3  (Fab XENP20359, scFv XENP20396)

SEQ ID NO: 38121 - protein, 12 aa, synthetic construct
  source 1..12: note = Description of Artificial Sequence: Synthetic peptide; note = [CTLA-4]_H3.5_L2.3  (Fab XENP20359, scFv XENP20396) vlCDR1
RASQSVSSSYLA

SEQ ID NO: 38122 - protein, 7 aa, synthetic construct
  source 1..7: note = Description of Artificial Sequence: Synthetic peptide; note = [CTLA-4]_H3.5_L2.3  (Fab XENP20359, scFv XENP20396) vlCDR2
GASSRAT

SEQ ID NO: 38123 - protein, 9 aa, synthetic construct
  source 1..9: note = Description of Artificial Sequence: Synthetic peptide; note = [CTLA-4]_H3.5_L2.3  (Fab XENP20359, scFv XENP20396) vlCDR3
QQYGSSPWT

SEQ ID NO: 38124 - protein, 246 aa, synthetic construct; identical to SEQ ID NO: 2829
  source 1..246: note = Description of Artificial Sequence: Synthetic polypeptide; note = scFV of [CTLA-4]_H3.5_L2.3  (Fab XENP20359, scFv XENP20396)

SEQ ID NO: 38125 - protein, 118 aa, synthetic construct; identical to SEQ ID NO: 139
  source 1..118: note = Description of Artificial Sequence: Synthetic polypeptide; note = VH of [CTLA-4]_H3_L0  (Fab XENP19546, scFv XENP19553)

SEQ ID NO: 38126 - protein, 5 aa, synthetic construct
  source 1..5: note = Description of Artificial Sequence: Synthetic peptide; note = [CTLA-4]_H3_L0  (Fab XENP19546, scFv XENP19553) vhCDR1
SYTMH

SEQ ID NO: 38127 - protein, 17 aa, synthetic construct
  source 1..17: note = Description of Artificial Sequence: Synthetic peptide; note = [CTLA-4]_H3_L0  (Fab XENP19546, scFv XENP19553) vhCDR2
FISYDGNNKYYADSVKG

SEQ ID NO: 38128 - protein, 9 aa, synthetic construct
  source 1..9: note = Description of Artificial Sequence: Synthetic peptide; note = [CTLA-4]_H3_L0  (Fab XENP19546, scFv XENP19553) vhCDR3
TGWLGPFDY

SEQ ID NO: 38129 - protein, 108 aa, synthetic construct; identical to SEQ ID NO: 23
  source 1..108: note = Description of Artificial Sequence: Synthetic polypeptide; note = VL of [CTLA-4]_H3_L0  (Fab XENP19546, scFv XENP19553)

SEQ ID NO: 38130 - protein, 12 aa, synthetic construct
  source 1..12: note = Description of Artificial Sequence: Synthetic peptide; note = [CTLA-4]_H3_L0  (Fab XENP19546, scFv XENP19553) vlCDR1
RASQSVGSSYLA

SEQ ID NO: 38131 - protein, 7 aa, synthetic construct
  source 1..7: note = Description of Artificial Sequence: Synthetic peptide; note = [CTLA-4]_H3_L0  (Fab XENP19546, scFv XENP19553) vlCDR2
GAFSRAT

SEQ ID NO: 38132 - protein, 9 aa, synthetic construct
  source 1..9: note = Description of Artificial Sequence: Synthetic peptide; note = [CTLA-4]_H3_L0  (Fab XENP19546, scFv XENP19553) vlCDR3
QQYGSSPWT

SEQ ID NO: 38133 - protein, 246 aa, synthetic construct; identical to SEQ ID NO: 138
  source 1..246: note = Description of Artificial Sequence: Synthetic polypeptide; note = scFV of [CTLA-4]_H3_L0  (Fab XENP19546, scFv XENP19553)

SEQ ID NO: 38134 - protein, 118 aa, synthetic construct; identical to SEQ ID NO: 139
  source 1..118: note = Description of Artificial Sequence: Synthetic polypeptide; note = VH of [CTLA-4]_H3_L0.22  (Fab XENP20011)

SEQ ID NO: 38135 - protein, 5 aa, synthetic construct
  source 1..5: note = Description of Artificial Sequence: Synthetic peptide; note = [CTLA-4]_H3_L0.22  (Fab XENP20011) vhCDR1
SYTMH

SEQ ID NO: 38136 - protein, 17 aa, synthetic construct
  source 1..17: note = Description of Artificial Sequence: Synthetic peptide; note = [CTLA-4]_H3_L0.22  (Fab XENP20011) vhCDR2
FISYDGNNKYYADSVKG

SEQ ID NO: 38137 - protein, 9 aa, synthetic construct
  source 1..9: note = Description of Artificial Sequence: Synthetic peptide; note = [CTLA-4]_H3_L0.22  (Fab XENP20011) vhCDR3
TGWLGPFDY

SEQ ID NO: 38138 - protein, 108 aa, synthetic construct; identical to SEQ ID NO: 1607
  source 1..108: note = Description of Artificial Sequence: Synthetic polypeptide; note = VL of [CTLA-4]_H3_L0.22  (Fab XENP20011)

SEQ ID NO: 38139 - protein, 12 aa, synthetic construct
  source 1..12: note = Description of Artificial Sequence: Synthetic peptide; note = [CTLA-4]_H3_L0.22  (Fab XENP20011) vlCDR1
RASQSVSSSYLA

SEQ ID NO: 38140 - protein, 7 aa, synthetic construct
  source 1..7: note = Description of Artificial Sequence: Synthetic peptide; note = [CTLA-4]_H3_L0.22  (Fab XENP20011) vlCDR2
GAFSRAT

SEQ ID NO: 38141 - protein, 9 aa, synthetic construct
  source 1..9: note = Description of Artificial Sequence: Synthetic peptide; note = [CTLA-4]_H3_L0.22  (Fab XENP20011) vlCDR3
QQYGSSPWT

SEQ ID NO: 38142 - protein, 246 aa, synthetic construct
  source 1..246: note = Description of Artificial Sequence: Synthetic polypeptide; note = scFV of [CTLA-4]_H3_L0.22  (Fab XENP20011)
EVQLVESGGGLVKPGGSLRLSCAASGFTFSSYTMHWVRQAPGKGLEWVSFISYDGNNKYYADSVKGRFTISRDNAKNSLYLQMNSLRAEDTAVYYCARTGWLGPFDYWGQGTLVTVSSGKPGSGKPGSGKPGSGKPGSEIVLTQSPGTLSLSPGERATLSCRASQSVSSSYLAWYQQKPGQAPRLLIYGAFSRATGIPDRFSGSGSGTDFTLTISRLEPEDFAVYYCQQYGSSPWTFGQGTKVEIK

SEQ ID NO: 38143 - protein, 118 aa, synthetic construct; identical to SEQ ID NO: 139
  source 1..118: note = Description of Artificial Sequence: Synthetic polypeptide; note = VH of [CTLA-4]_H3_L0.44  (Fab XENP20052)

SEQ ID NO: 38144 - protein, 5 aa, synthetic construct
  source 1..5: note = Description of Artificial Sequence: Synthetic peptide; note = [CTLA-4]_H3_L0.44  (Fab XENP20052) vhCDR1
SYTMH

SEQ ID NO: 38145 - protein, 17 aa, synthetic construct
  source 1..17: note = Description of Artificial Sequence: Synthetic peptide; note = [CTLA-4]_H3_L0.44  (Fab XENP20052) vhCDR2
FISYDGNNKYYADSVKG

SEQ ID NO: 38146 - protein, 9 aa, synthetic construct
  source 1..9: note = Description of Artificial Sequence: Synthetic peptide; note = [CTLA-4]_H3_L0.44  (Fab XENP20052) vhCDR3
TGWLGPFDY

SEQ ID NO: 38147 - protein, 108 aa, synthetic construct; identical to SEQ ID NO: 1805
  source 1..108: note = Description of Artificial Sequence: Synthetic polypeptide; note = VL of [CTLA-4]_H3_L0.44  (Fab XENP20052)

SEQ ID NO: 38148 - protein, 12 aa, synthetic construct
  source 1..12: note = Description of Artificial Sequence: Synthetic peptide; note = [CTLA-4]_H3_L0.44  (Fab XENP20052) vlCDR1
RASQSVGSSYLS

SEQ ID NO: 38149 - protein, 7 aa, synthetic construct
  source 1..7: note = Description of Artificial Sequence: Synthetic peptide; note = [CTLA-4]_H3_L0.44  (Fab XENP20052) vlCDR2
GAFSRAT

SEQ ID NO: 38150 - protein, 9 aa, synthetic construct
  source 1..9: note = Description of Artificial Sequence: Synthetic peptide; note = [CTLA-4]_H3_L0.44  (Fab XENP20052) vlCDR3
QQYGSSPWT

SEQ ID NO: 38151 - protein, 246 aa, synthetic construct
  source 1..246: note = Description of Artificial Sequence: Synthetic polypeptide; note = scFV of [CTLA-4]_H3_L0.44  (Fab XENP20052)
EVQLVESGGGLVKPGGSLRLSCAASGFTFSSYTMHWVRQAPGKGLEWVSFISYDGNNKYYADSVKGRFTISRDNAKNSLYLQMNSLRAEDTAVYYCARTGWLGPFDYWGQGTLVTVSSGKPGSGKPGSGKPGSGKPGSEIVLTQSPGTLSLSPGERATLSCRASQSVGSSYLSWYQQKPGQAPRLLIYGAFSRATGIPDRFSGSGSGTDFTLTISRLEPEDFAVYYCQQYGSSPWTFGQGTKVEIK

SEQ ID NO: 38152 - protein, 118 aa, synthetic construct; identical to SEQ ID NO: 139
  source 1..118: note = Description of Artificial Sequence: Synthetic polypeptide; note = VH of [CTLA-4]_H3_L0.67  (Fab XENP20018)

SEQ ID NO: 38153 - protein, 5 aa, synthetic construct
  source 1..5: note = Description of Artificial Sequence: Synthetic peptide; note = [CTLA-4]_H3_L0.67  (Fab XENP20018) vhCDR1
SYTMH

SEQ ID NO: 38154 - protein, 17 aa, synthetic construct
  source 1..17: note = Description of Artificial Sequence: Synthetic peptide; note = [CTLA-4]_H3_L0.67  (Fab XENP20018) vhCDR2
FISYDGNNKYYADSVKG

SEQ ID NO: 38155 - protein, 9 aa, synthetic construct
  source 1..9: note = Description of Artificial Sequence: Synthetic peptide; note = [CTLA-4]_H3_L0.67  (Fab XENP20018) vhCDR3
TGWLGPFDY

SEQ ID NO: 38156 - protein, 108 aa, synthetic construct; identical to SEQ ID NO: 2012
  source 1..108: note = Description of Artificial Sequence: Synthetic polypeptide; note = VL of [CTLA-4]_H3_L0.67  (Fab XENP20018)

SEQ ID NO: 38157 - protein, 12 aa, synthetic construct
  source 1..12: note = Description of Artificial Sequence: Synthetic peptide; note = [CTLA-4]_H3_L0.67  (Fab XENP20018) vlCDR1
RASQSVGSSYLA

SEQ ID NO: 38158 - protein, 7 aa, synthetic construct
  source 1..7: note = Description of Artificial Sequence: Synthetic peptide; note = [CTLA-4]_H3_L0.67  (Fab XENP20018) vlCDR2
DAFSRAT

SEQ ID NO: 38159 - protein, 9 aa, synthetic construct
  source 1..9: note = Description of Artificial Sequence: Synthetic peptide; note = [CTLA-4]_H3_L0.67  (Fab XENP20018) vlCDR3
QQYGSSPWT

SEQ ID NO: 38160 - protein, 246 aa, synthetic construct
  source 1..246: note = Description of Artificial Sequence: Synthetic polypeptide; note = scFV of [CTLA-4]_H3_L0.67  (Fab XENP20018)
EVQLVESGGGLVKPGGSLRLSCAASGFTFSSYTMHWVRQAPGKGLEWVSFISYDGNNKYYADSVKGRFTISRDNAKNSLYLQMNSLRAEDTAVYYCARTGWLGPFDYWGQGTLVTVSSGKPGSGKPGSGKPGSGKPGSEIVLTQSPGTLSLSPGERATLSCRASQSVGSSYLAWYQQKPGQAPRLLIYDAFSRATGIPDRFSGSGSGTDFTLTISRLEPEDFAVYYCQQYGSSPWTFGQGTKVEIK

SEQ ID NO: 38161 - protein, 118 aa, synthetic construct; identical to SEQ ID NO: 139
  source 1..118: note = Description of Artificial Sequence: Synthetic polypeptide; note = VH of [CTLA-4]_H3_L0.74  (Fab XENP20020)

SEQ ID NO: 38162 - protein, 5 aa, synthetic construct
  source 1..5: note = Description of Artificial Sequence: Synthetic peptide; note = [CTLA-4]_H3_L0.74  (Fab XENP20020) vhCDR1
SYTMH

SEQ ID NO: 38163 - protein, 17 aa, synthetic construct
  source 1..17: note = Description of Artificial Sequence: Synthetic peptide; note = [CTLA-4]_H3_L0.74  (Fab XENP20020) vhCDR2
FISYDGNNKYYADSVKG

SEQ ID NO: 38164 - protein, 9 aa, synthetic construct
  source 1..9: note = Description of Artificial Sequence: Synthetic peptide; note = [CTLA-4]_H3_L0.74  (Fab XENP20020) vhCDR3
TGWLGPFDY

SEQ ID NO: 38165 - protein, 108 aa, synthetic construct; identical to SEQ ID NO: 2075
  source 1..108: note = Description of Artificial Sequence: Synthetic polypeptide; note = VL of [CTLA-4]_H3_L0.74  (Fab XENP20020)

SEQ ID NO: 38166 - protein, 12 aa, synthetic construct
  source 1..12: note = Description of Artificial Sequence: Synthetic peptide; note = [CTLA-4]_H3_L0.74  (Fab XENP20020) vlCDR1
RASQSVGSSYLA

SEQ ID NO: 38167 - protein, 7 aa, synthetic construct
  source 1..7: note = Description of Artificial Sequence: Synthetic peptide; note = [CTLA-4]_H3_L0.74  (Fab XENP20020) vlCDR2
GAYSRAT

SEQ ID NO: 38168 - protein, 9 aa, synthetic construct
  source 1..9: note = Description of Artificial Sequence: Synthetic peptide; note = [CTLA-4]_H3_L0.74  (Fab XENP20020) vlCDR3
QQYGSSPWT

SEQ ID NO: 38169 - protein, 246 aa, synthetic construct
  source 1..246: note = Description of Artificial Sequence: Synthetic polypeptide; note = scFV of [CTLA-4]_H3_L0.74  (Fab XENP20020)
EVQLVESGGGLVKPGGSLRLSCAASGFTFSSYTMHWVRQAPGKGLEWVSFISYDGNNKYYADSVKGRFTISRDNAKNSLYLQMNSLRAEDTAVYYCARTGWLGPFDYWGQGTLVTVSSGKPGSGKPGSGKPGSGKPGSEIVLTQSPGTLSLSPGERATLSCRASQSVGSSYLAWYQQKPGQAPRLLIYGAYSRATGIPDRFSGSGSGTDFTLTISRLEPEDFAVYYCQQYGSSPWTFGQGTKVEIK

SEQ ID NO: 38170 - protein, 121 aa, synthetic construct; identical to SEQ ID NO: 22485
  source 1..121: note = Description of Artificial Sequence: Synthetic polypeptide; note = VH of XENP22594

SEQ ID NO: 38171 - protein, 5 aa, synthetic construct
  source 1..5: note = Description of Artificial Sequence: Synthetic peptide; note = XENP22594 vhCDR1
DAWMS

SEQ ID NO: 38172 - protein, 19 aa, synthetic construct
  source 1..19: note = Description of Artificial Sequence: Synthetic peptide; note = XENP22594 vhCDR2
EISTKANNHATYYAESVKG

SEQ ID NO: 38173 - protein, 10 aa, synthetic construct
  source 1..10: note = Description of Artificial Sequence: Synthetic peptide; note = XENP22594 vhCDR3
LATWDWYFDV

SEQ ID NO: 38174 - protein, 111 aa, synthetic construct; identical to SEQ ID NO: 22600
  source 1..111: note = Description of Artificial Sequence: Synthetic polypeptide; note = VL of XENP22594

SEQ ID NO: 38175 - protein, 15 aa, synthetic construct
  source 1..15: note = Description of Artificial Sequence: Synthetic peptide; note = XENP22594 vlCDR1
RASQSVDYDGDSYMN

SEQ ID NO: 38176 - protein, 7 aa, synthetic construct
  source 1..7: note = Description of Artificial Sequence: Synthetic peptide; note = XENP22594 vlCDR2
AASELES

SEQ ID NO: 38177 - protein, 9 aa, synthetic construct
  source 1..9: note = Description of Artificial Sequence: Synthetic peptide; note = XENP22594 vlCDR3
QQSNEDPFT

SEQ ID NO: 38178 - protein, 118 aa, synthetic construct; identical to SEQ ID NO: 22085
  source 1..118: note = Description of Artificial Sequence: Synthetic polypeptide; note = VH of XENP22656

SEQ ID NO: 38179 - protein, 5 aa, synthetic construct
  source 1..5: note = Description of Artificial Sequence: Synthetic peptide; note = XENP22656 vhCDR1
DYFMH

SEQ ID NO: 38180 - protein, 17 aa, synthetic construct
  source 1..17: note = Description of Artificial Sequence: Synthetic peptide; note = XENP22656 vhCDR2
WIDPELGDTEYAPKFQG

SEQ ID NO: 38181 - protein, 9 aa, synthetic construct
  source 1..9: note = Description of Artificial Sequence: Synthetic peptide; note = XENP22656 vhCDR3
RGVYQALDY

SEQ ID NO: 38182 - protein, 107 aa, synthetic construct; identical to SEQ ID NO: 22280
  source 1..107: note = Description of Artificial Sequence: Synthetic polypeptide; note = VL of XENP22656

SEQ ID NO: 38183 - protein, 11 aa, synthetic construct
  source 1..11: note = Description of Artificial Sequence: Synthetic peptide; note = XENP22656 vlCDR1
QASQDIGNYLN

SEQ ID NO: 38184 - protein, 7 aa, synthetic construct
  source 1..7: note = Description of Artificial Sequence: Synthetic peptide; note = XENP22656 vlCDR2
FTSYLHS

SEQ ID NO: 38185 - protein, 9 aa, synthetic construct
  source 1..9: note = Description of Artificial Sequence: Synthetic peptide; note = XENP22656 vlCDR3
QQGNTLPYT

SEQ ID NO: 38186 - protein, 121 aa, synthetic construct; identical to SEQ ID NO: 22325
  source 1..121: note = Description of Artificial Sequence: Synthetic polypeptide; note = VH of XENP21670

SEQ ID NO: 38187 - protein, 5 aa, synthetic construct
  source 1..5: note = Description of Artificial Sequence: Synthetic peptide; note = XENP21670 vhCDR1
DAWMD

SEQ ID NO: 38188 - protein, 19 aa, synthetic construct
  source 1..19: note = Description of Artificial Sequence: Synthetic peptide; note = XENP21670 vhCDR2
EISTKANNHATYYAESVKG

SEQ ID NO: 38189 - protein, 10 aa, synthetic construct
  source 1..10: note = Description of Artificial Sequence: Synthetic peptide; note = XENP21670 vhCDR3
LATWDWYFDV

SEQ ID NO: 38190 - protein, 111 aa, synthetic construct; identical to SEQ ID NO: 22360
  source 1..111: note = Description of Artificial Sequence: Synthetic polypeptide; note = VL of XENP21670

SEQ ID NO: 38191 - protein, 15 aa, synthetic construct
  source 1..15: note = Description of Artificial Sequence: Synthetic peptide; note = XENP21670 vlCDR1
RASQSVDYDGDSYMN

SEQ ID NO: 38192 - protein, 7 aa, synthetic construct
  source 1..7: note = Description of Artificial Sequence: Synthetic peptide; note = XENP21670 vlCDR2
AASELES

SEQ ID NO: 38193 - protein, 9 aa, synthetic construct
  source 1..9: note = Description of Artificial Sequence: Synthetic peptide; note = XENP21670 vlCDR3
QQSNEDPFT

SEQ ID NO: 38194 - protein, 121 aa, synthetic construct; identical to SEQ ID NO: 17586
  source 1..121: note = Description of Artificial Sequence: Synthetic polypeptide; note = VH of XENP20930

SEQ ID NO: 38195 - protein, 5 aa, synthetic construct
  source 1..5: note = Description of Artificial Sequence: Synthetic peptide; note = XENP20930 vhCDR1
DAWMD

SEQ ID NO: 38196 - protein, 19 aa, synthetic construct
  source 1..19: note = Description of Artificial Sequence: Synthetic peptide; note = XENP20930 vhCDR2
EIRTKANNHATYYAESVKG

SEQ ID NO: 38197 - protein, 10 aa, synthetic construct
  source 1..10: note = Description of Artificial Sequence: Synthetic peptide; note = XENP20930 vhCDR3
LANWDWYFDV

SEQ ID NO: 38198 - protein, 111 aa, synthetic construct; identical to SEQ ID NO: 17591
  source 1..111: note = Description of Artificial Sequence: Synthetic polypeptide; note = VL of XENP20930

SEQ ID NO: 38199 - protein, 15 aa, synthetic construct
  source 1..15: note = Description of Artificial Sequence: Synthetic peptide; note = XENP20930 vlCDR1
KASQSVDYDGDSYMN

SEQ ID NO: 38200 - protein, 7 aa, synthetic construct
  source 1..7: note = Description of Artificial Sequence: Synthetic peptide; note = XENP20930 vlCDR2
AASNLES

SEQ ID NO: 38201 - protein, 9 aa, synthetic construct
  source 1..9: note = Description of Artificial Sequence: Synthetic peptide; note = XENP20930 vlCDR3
QQSNEDPFT

SEQ ID NO: 38202 - protein, 118 aa, synthetic construct; identical to SEQ ID NO: 22065
  source 1..118: note = Description of Artificial Sequence: Synthetic polypeptide; note = VH of XENP21921

SEQ ID NO: 38203 - protein, 5 aa, synthetic construct
  source 1..5: note = Description of Artificial Sequence: Synthetic peptide; note = XENP21921 vhCDR1
HYFMH

SEQ ID NO: 38204 - protein, 17 aa, synthetic construct
  source 1..17: note = Description of Artificial Sequence: Synthetic peptide; note = XENP21921 vhCDR2
WIDPYLGDTEYAPKFQG

SEQ ID NO: 38205 - protein, 9 aa, synthetic construct
  source 1..9: note = Description of Artificial Sequence: Synthetic peptide; note = XENP21921 vhCDR3
RGVYQALDY

SEQ ID NO: 38206 - protein, 107 aa, synthetic construct; identical to SEQ ID NO: 22080
  source 1..107: note = Description of Artificial Sequence: Synthetic polypeptide; note = VL of XENP21921

SEQ ID NO: 38207 - protein, 11 aa, synthetic construct
  source 1..11: note = Description of Artificial Sequence: Synthetic peptide; note = XENP21921 vlCDR1
QASQDIGNYLN

SEQ ID NO: 38208 - protein, 7 aa, synthetic construct
  source 1..7: note = Description of Artificial Sequence: Synthetic peptide; note = XENP21921 vlCDR2
FTSYLHS

SEQ ID NO: 38209 - protein, 9 aa, synthetic construct
  source 1..9: note = Description of Artificial Sequence: Synthetic peptide; note = XENP21921 vlCDR3
QQGNTLPYT

SEQ ID NO: 38210 - protein, 118 aa, synthetic construct; identical to SEQ ID NO: 17236
  source 1..118: note = Description of Artificial Sequence: Synthetic polypeptide; note = VH of XENP20847

SEQ ID NO: 38211 - protein, 5 aa, synthetic construct
  source 1..5: note = Description of Artificial Sequence: Synthetic peptide; note = XENP20847 vhCDR1
DYYMH

SEQ ID NO: 38212 - protein, 17 aa, synthetic construct
  source 1..17: note = Description of Artificial Sequence: Synthetic peptide; note = XENP20847 vhCDR2
WIDPENGDTEYAPKFQG

SEQ ID NO: 38213 - protein, 9 aa, synthetic construct
  source 1..9: note = Description of Artificial Sequence: Synthetic peptide; note = XENP20847 vhCDR3
RGVRQALDY

SEQ ID NO: 38214 - protein, 107 aa, synthetic construct; identical to SEQ ID NO: 17251
  source 1..107: note = Description of Artificial Sequence: Synthetic polypeptide; note = VL of XENP20847

SEQ ID NO: 38215 - protein, 11 aa, synthetic construct
  source 1..11: note = Description of Artificial Sequence: Synthetic peptide; note = XENP20847 vlCDR1
QASQDIGNYLN

SEQ ID NO: 38216 - protein, 7 aa, synthetic construct
  source 1..7: note = Description of Artificial Sequence: Synthetic peptide; note = XENP20847 vlCDR2
YTSRLHS

SEQ ID NO: 38217 - protein, 9 aa, synthetic construct
  source 1..9: note = Description of Artificial Sequence: Synthetic peptide; note = XENP20847 vlCDR3
QQGNTLPYT

SEQ ID NO: 38218 - protein, 118 aa, synthetic construct; identical to SEQ ID NO: 17236
  source 1..118: note = Description of Artificial Sequence: Synthetic polypeptide; note = VH of XENP21372

SEQ ID NO: 38219 - protein, 5 aa, synthetic construct
  source 1..5: note = Description of Artificial Sequence: Synthetic peptide; note = XENP21372 vhCDR1
DYYMH

SEQ ID NO: 38220 - protein, 17 aa, synthetic construct
  source 1..17: note = Description of Artificial Sequence: Synthetic peptide; note = XENP21372 vhCDR2
WIDPENGDTEYAPKFQG

SEQ ID NO: 38221 - protein, 9 aa, synthetic construct
  source 1..9: note = Description of Artificial Sequence: Synthetic peptide; note = XENP21372 vhCDR3
RGVRQALDY

SEQ ID NO: 38222 - protein, 107 aa, synthetic construct; identical to SEQ ID NO: 22180
  source 1..107: note = Description of Artificial Sequence: Synthetic polypeptide; note = VL of XENP21372

SEQ ID NO: 38223 - protein, 11 aa, synthetic construct
  source 1..11: note = Description of Artificial Sequence: Synthetic peptide; note = XENP21372 vlCDR1
QASQDIGNHLN

SEQ ID NO: 38224 - protein, 7 aa, synthetic construct
  source 1..7: note = Description of Artificial Sequence: Synthetic peptide; note = XENP21372 vlCDR2
YTSRLHS

SEQ ID NO: 38225 - protein, 9 aa, synthetic construct
  source 1..9: note = Description of Artificial Sequence: Synthetic peptide; note = XENP21372 vlCDR3
QQGNTLPYT

SEQ ID NO: 38226 - protein, 118 aa, synthetic construct; identical to SEQ ID NO: 17236
  source 1..118: note = Description of Artificial Sequence: Synthetic polypeptide; note = VH of XENP21394

SEQ ID NO: 38227 - protein, 5 aa, synthetic construct
  source 1..5: note = Description of Artificial Sequence: Synthetic peptide; note = XENP21394 vhCDR1
DYYMH

SEQ ID NO: 38228 - protein, 17 aa, synthetic construct
  source 1..17: note = Description of Artificial Sequence: Synthetic peptide; note = XENP21394 vhCDR2
WIDPENGDTEYAPKFQG

SEQ ID NO: 38229 - protein, 9 aa, synthetic construct
  source 1..9: note = Description of Artificial Sequence: Synthetic peptide; note = XENP21394 vhCDR3
RGVRQALDY

SEQ ID NO: 38230 - protein, 107 aa, synthetic construct; identical to SEQ ID NO: 22040
  source 1..107: note = Description of Artificial Sequence: Synthetic polypeptide; note = VL of XENP21394

SEQ ID NO: 38231 - protein, 11 aa, synthetic construct
  source 1..11: note = Description of Artificial Sequence: Synthetic peptide; note = XENP21394 vlCDR1
QASQDIGNYLN

SEQ ID NO: 38232 - protein, 7 aa, synthetic construct
  source 1..7: note = Description of Artificial Sequence: Synthetic peptide; note = XENP21394 vlCDR2
YTSHLHS

SEQ ID NO: 38233 - protein, 9 aa, synthetic construct
  source 1..9: note = Description of Artificial Sequence: Synthetic peptide; note = XENP21394 vlCDR3
QQGNTLPYT

SEQ ID NO: 38234 - protein, 118 aa, synthetic construct; identical to SEQ ID NO: 17236
  source 1..118: note = Description of Artificial Sequence: Synthetic polypeptide; note = VH of XENP21401

SEQ ID NO: 38235 - protein, 5 aa, synthetic construct
  source 1..5: note = Description of Artificial Sequence: Synthetic peptide; note = XENP21401 vhCDR1
DYYMH

SEQ ID NO: 38236 - protein, 17 aa, synthetic construct
  source 1..17: note = Description of Artificial Sequence: Synthetic peptide; note = XENP21401 vhCDR2
WIDPENGDTEYAPKFQG

SEQ ID NO: 38237 - protein, 9 aa, synthetic construct
  source 1..9: note = Description of Artificial Sequence: Synthetic peptide; note = XENP21401 vhCDR3
RGVRQALDY

SEQ ID NO: 38238 - protein, 107 aa, synthetic construct; identical to SEQ ID NO: 22060
  source 1..107: note = Description of Artificial Sequence: Synthetic polypeptide; note = VL of XENP21401

SEQ ID NO: 38239 - protein, 11 aa, synthetic construct
  source 1..11: note = Description of Artificial Sequence: Synthetic peptide; note = XENP21401 vlCDR1
QASQDIGNYLN

SEQ ID NO: 38240 - protein, 7 aa, synthetic construct
  source 1..7: note = Description of Artificial Sequence: Synthetic peptide; note = XENP21401 vlCDR2
YTSYLHS

SEQ ID NO: 38241 - protein, 9 aa, synthetic construct
  source 1..9: note = Description of Artificial Sequence: Synthetic peptide; note = XENP21401 vlCDR3
QQGNTLPYT

SEQ ID NO: 38242 - protein, 118 aa, synthetic construct; identical to SEQ ID NO: 17236
  source 1..118: note = Description of Artificial Sequence: Synthetic polypeptide; note = VH of XENP20847

SEQ ID NO: 38243 - protein, 5 aa, synthetic construct
  source 1..5: note = Description of Artificial Sequence: Synthetic peptide; note = XENP20847 vhCDR1
DYYMH

SEQ ID NO: 38244 - protein, 17 aa, synthetic construct
  source 1..17: note = Description of Artificial Sequence: Synthetic peptide; note = XENP20847 vhCDR2
WIDPENGDTEYAPKFQG

SEQ ID NO: 38245 - protein, 9 aa, synthetic construct
  source 1..9: note = Description of Artificial Sequence: Synthetic peptide; note = XENP20847 vhCDR3
RGVRQALDY

SEQ ID NO: 38246 - protein, 107 aa, synthetic construct; identical to SEQ ID NO: 17251
  source 1..107: note = Description of Artificial Sequence: Synthetic polypeptide; note = VL of XENP20847

SEQ ID NO: 38247 - protein, 11 aa, synthetic construct
  source 1..11: note = Description of Artificial Sequence: Synthetic peptide; note = XENP20847 vlCDR1
QASQDIGNYLN

SEQ ID NO: 38248 - protein, 7 aa, synthetic construct
  source 1..7: note = Description of Artificial Sequence: Synthetic peptide; note = XENP20847 vlCDR2
YTSRLHS

SEQ ID NO: 38249 - protein, 9 aa, synthetic construct
  source 1..9: note = Description of Artificial Sequence: Synthetic peptide; note = XENP20847 vlCDR3
QQGNTLPYT

SEQ ID NO: 38250 - protein, 121 aa, synthetic construct; identical to SEQ ID NO: 22325
  source 1..121: note = Description of Artificial Sequence: Synthetic polypeptide; note = VH of XENP21670

SEQ ID NO: 38251 - protein, 5 aa, synthetic construct
  source 1..5: note = Description of Artificial Sequence: Synthetic peptide; note = XENP21670 vhCDR1
DAWMD

SEQ ID NO: 38252 - protein, 19 aa, synthetic construct
  source 1..19: note = Description of Artificial Sequence: Synthetic peptide; note = XENP21670 vhCDR2
EISTKANNHATYYAESVKG

SEQ ID NO: 38253 - protein, 10 aa, synthetic construct
  source 1..10: note = Description of Artificial Sequence: Synthetic peptide; note = XENP21670 vhCDR3
LATWDWYFDV

SEQ ID NO: 38254 - protein, 111 aa, synthetic construct; identical to SEQ ID NO: 22360
  source 1..111: note = Description of Artificial Sequence: Synthetic polypeptide; note = VL of XENP21670

SEQ ID NO: 38255 - protein, 15 aa, synthetic construct
  source 1..15: note = Description of Artificial Sequence: Synthetic peptide; note = XENP21670 vlCDR1
RASQSVDYDGDSYMN

SEQ ID NO: 38256 - protein, 7 aa, synthetic construct
  source 1..7: note = Description of Artificial Sequence: Synthetic peptide; note = XENP21670 vlCDR2
AASELES

SEQ ID NO: 38257 - protein, 9 aa, synthetic construct
  source 1..9: note = Description of Artificial Sequence: Synthetic peptide; note = XENP21670 vlCDR3
QQSNEDPFT

SEQ ID NO: 38258 - protein, 121 aa, synthetic construct; identical to SEQ ID NO: 22425
  source 1..121: note = Description of Artificial Sequence: Synthetic polypeptide; note = VH of XENP21892

SEQ ID NO: 38259 - protein, 5 aa, synthetic construct
  source 1..5: note = Description of Artificial Sequence: Synthetic peptide; note = XENP21892 vhCDR1
DAWMD

SEQ ID NO: 38260 - protein, 19 aa, synthetic construct
  source 1..19: note = Description of Artificial Sequence: Synthetic peptide; note = XENP21892 vhCDR2
EISTKAYNHATYYAESVKG

SEQ ID NO: 38261 - protein, 10 aa, synthetic construct
  source 1..10: note = Description of Artificial Sequence: Synthetic peptide; note = XENP21892 vhCDR3
LATWDWYFDV

SEQ ID NO: 38262 - protein, 111 aa, synthetic construct; identical to SEQ ID NO: 17601
  source 1..111: note = Description of Artificial Sequence: Synthetic polypeptide; note = VL of XENP21892

SEQ ID NO: 38263 - protein, 15 aa, synthetic construct
  source 1..15: note = Description of Artificial Sequence: Synthetic peptide; note = XENP21892 vlCDR1
RASQSVDYDGDSYMN

SEQ ID NO: 38264 - protein, 7 aa, synthetic construct
  source 1..7: note = Description of Artificial Sequence: Synthetic peptide; note = XENP21892 vlCDR2
AASNLES

SEQ ID NO: 38265 - protein, 9 aa, synthetic construct
  source 1..9: note = Description of Artificial Sequence: Synthetic peptide; note = XENP21892 vlCDR3
QQSNEDPFT

SEQ ID NO: 38266 - protein, 121 aa, synthetic construct; identical to SEQ ID NO: 22425
  source 1..121: note = Description of Artificial Sequence: Synthetic polypeptide; note = VH of XENP21893

SEQ ID NO: 38267 - protein, 5 aa, synthetic construct
  source 1..5: note = Description of Artificial Sequence: Synthetic peptide; note = XENP21893 vhCDR1
DAWMD

SEQ ID NO: 38268 - protein, 19 aa, synthetic construct
  source 1..19: note = Description of Artificial Sequence: Synthetic peptide; note = XENP21893 vhCDR2
EISTKAYNHATYYAESVKG

SEQ ID NO: 38269 - protein, 10 aa, synthetic construct
  source 1..10: note = Description of Artificial Sequence: Synthetic peptide; note = XENP21893 vhCDR3
LATWDWYFDV

SEQ ID NO: 38270 - protein, 111 aa, synthetic construct; identical to SEQ ID NO: 22360
  source 1..111: note = Description of Artificial Sequence: Synthetic polypeptide; note = VL of XENP21893

SEQ ID NO: 38271 - protein, 15 aa, synthetic construct
  source 1..15: note = Description of Artificial Sequence: Synthetic peptide; note = XENP21893 vlCDR1
RASQSVDYDGDSYMN

SEQ ID NO: 38272 - protein, 7 aa, synthetic construct
  source 1..7: note = Description of Artificial Sequence: Synthetic peptide; note = XENP21893 vlCDR2
AASELES

SEQ ID NO: 38273 - protein, 9 aa, synthetic construct
  source 1..9: note = Description of Artificial Sequence: Synthetic peptide; note = XENP21893 vlCDR3
QQSNEDPFT

SEQ ID NO: 38274 - protein, 121 aa, synthetic construct; identical to SEQ ID NO: 22425
  source 1..121: note = Description of Artificial Sequence: Synthetic polypeptide; note = VH of XENP21894

SEQ ID NO: 38275 - protein, 5 aa, synthetic construct
  source 1..5: note = Description of Artificial Sequence: Synthetic peptide; note = XENP21894 vhCDR1
DAWMD

SEQ ID NO: 38276 - protein, 19 aa, synthetic construct
  source 1..19: note = Description of Artificial Sequence: Synthetic peptide; note = XENP21894 vhCDR2
EISTKAYNHATYYAESVKG

SEQ ID NO: 38277 - protein, 10 aa, synthetic construct
  source 1..10: note = Description of Artificial Sequence: Synthetic peptide; note = XENP21894 vhCDR3
LATWDWYFDV

SEQ ID NO: 38278 - protein, 111 aa, synthetic construct; identical to SEQ ID NO: 22420
  source 1..111: note = Description of Artificial Sequence: Synthetic polypeptide; note = VL of XENP21894

SEQ ID NO: 38279 - protein, 15 aa, synthetic construct
  source 1..15: note = Description of Artificial Sequence: Synthetic peptide; note = XENP21894 vlCDR1
RASQSVDHDGDSYMN

SEQ ID NO: 38280 - protein, 7 aa, synthetic construct
  source 1..7: note = Description of Artificial Sequence: Synthetic peptide; note = XENP21894 vlCDR2
AASELES

SEQ ID NO: 38281 - protein, 9 aa, synthetic construct
  source 1..9: note = Description of Artificial Sequence: Synthetic peptide; note = XENP21894 vlCDR3
QQSNEDPFT

SEQ ID NO: 38282 - protein, 118 aa, synthetic construct; identical to SEQ ID NO: 20936
  source 1..118: note = Description of Artificial Sequence: Synthetic polypeptide; note = VH of XENP20269

SEQ ID NO: 38283 - protein, 5 aa, synthetic construct
  source 1..5: note = Description of Artificial Sequence: Synthetic peptide; note = XENP20269 vhCDR1
GYGVN

SEQ ID NO: 38284 - protein, 16 aa, synthetic construct
  source 1..16: note = Description of Artificial Sequence: Synthetic peptide; note = XENP20269 vhCDR2
MIWIDGSTDYNSALKS

SEQ ID NO: 38285 - protein, 10 aa, synthetic construct
  source 1..10: note = Description of Artificial Sequence: Synthetic peptide; note = XENP20269 vhCDR3
DRPDGRAMDY

SEQ ID NO: 38286 - protein, 106 aa, synthetic construct; identical to SEQ ID NO: 20941
  source 1..106: note = Description of Artificial Sequence: Synthetic polypeptide; note = VL of XENP20269

SEQ ID NO: 38287 - protein, 11 aa, synthetic construct
  source 1..11: note = Description of Artificial Sequence: Synthetic peptide; note = XENP20269 vlCDR1
KASQSVSNDVA

SEQ ID NO: 38288 - protein, 7 aa, synthetic construct
  source 1..7: note = Description of Artificial Sequence: Synthetic peptide; note = XENP20269 vlCDR2
YASNRYT

SEQ ID NO: 38289 - protein, 8 aa, synthetic construct
  source 1..8: note = Description of Artificial Sequence: Synthetic peptide; note = XENP20269 vlCDR3
QQDYSSPT

SEQ ID NO: 38290 - protein, 118 aa, synthetic construct; identical to SEQ ID NO: 21205
  source 1..118: note = Description of Artificial Sequence: Synthetic polypeptide; note = VH of XENP20872

SEQ ID NO: 38291 - protein, 5 aa, synthetic construct
  source 1..5: note = Description of Artificial Sequence: Synthetic peptide; note = XENP20872 vhCDR1
GYGVN

SEQ ID NO: 38292 - protein, 16 aa, synthetic construct
  source 1..16: note = Description of Artificial Sequence: Synthetic peptide; note = XENP20872 vhCDR2
MIWIDGSTDYNSKFQG

SEQ ID NO: 38293 - protein, 10 aa, synthetic construct
  source 1..10: note = Description of Artificial Sequence: Synthetic peptide; note = XENP20872 vhCDR3
DRPDGRAMDY

SEQ ID NO: 38294 - protein, 106 aa, synthetic construct; identical to SEQ ID NO: 21051
  source 1..106: note = Description of Artificial Sequence: Synthetic polypeptide; note = VL of XENP20872

SEQ ID NO: 38295 - protein, 11 aa, synthetic construct
  source 1..11: note = Description of Artificial Sequence: Synthetic peptide; note = XENP20872 vlCDR1
KASQSVSNDVA

SEQ ID NO: 38296 - protein, 7 aa, synthetic construct
  source 1..7: note = Description of Artificial Sequence: Synthetic peptide; note = XENP20872 vlCDR2
YASNRYT

SEQ ID NO: 38297 - protein, 8 aa, synthetic construct
  source 1..8: note = Description of Artificial Sequence: Synthetic peptide; note = XENP20872 vlCDR3
QQDYSSPT

SEQ ID NO: 38298 - protein, 118 aa, synthetic construct; identical to SEQ ID NO: 21305
  source 1..118: note = Description of Artificial Sequence: Synthetic polypeptide; note = VH of XENP020882

SEQ ID NO: 38299 - protein, 5 aa, synthetic construct
  source 1..5: note = Description of Artificial Sequence: Synthetic peptide; note = XENP020882 vhCDR1
GYGVN

SEQ ID NO: 38300 - protein, 16 aa, synthetic construct
  source 1..16: note = Description of Artificial Sequence: Synthetic peptide; note = XENP020882 vhCDR2
MIWIDGSTDYNSKFQG

SEQ ID NO: 38301 - protein, 10 aa, synthetic construct
  source 1..10: note = Description of Artificial Sequence: Synthetic peptide; note = XENP020882 vhCDR3
DRPDGRAMDY

SEQ ID NO: 38302 - protein, 106 aa, synthetic construct; identical to SEQ ID NO: 21051
  source 1..106: note = Description of Artificial Sequence: Synthetic polypeptide; note = VL of XENP020882

SEQ ID NO: 38303 - protein, 11 aa, synthetic construct
  source 1..11: note = Description of Artificial Sequence: Synthetic peptide; note = XENP020882 vlCDR1
KASQSVSNDVA

SEQ ID NO: 38304 - protein, 7 aa, synthetic construct
  source 1..7: note = Description of Artificial Sequence: Synthetic peptide; note = XENP020882 vlCDR2
YASNRYT

SEQ ID NO: 38305 - protein, 8 aa, synthetic construct
  source 1..8: note = Description of Artificial Sequence: Synthetic peptide; note = XENP020882 vlCDR3
QQDYSSPT

SEQ ID NO: 38306 - protein, 113 aa, synthetic construct; identical to SEQ ID NO: 36628
  source 1..113: note = Description of Artificial Sequence: Synthetic polypeptide; note = VH of XENP21503

SEQ ID NO: 38307 - protein, 5 aa, synthetic construct
  source 1..5: note = Description of Artificial Sequence: Synthetic peptide; note = XENP21503 vhCDR1
SFDMS

SEQ ID NO: 38308 - protein, 17 aa, synthetic construct
  source 1..17: note = Description of Artificial Sequence: Synthetic peptide; note = XENP21503 vhCDR2
YISSDGASTFYPDTMKG

SEQ ID NO: 38309 - protein, 4 aa, synthetic construct
  source 1..4: note = Description of Artificial Sequence: Synthetic peptide; note = XENP21503 vhCDR3
LGAY

SEQ ID NO: 38310 - protein, 112 aa, synthetic construct; identical to SEQ ID NO: 36703
  source 1..112: note = Description of Artificial Sequence: Synthetic polypeptide; note = VL of XENP21503

SEQ ID NO: 38311 - protein, 16 aa, synthetic construct
  source 1..16: note = Description of Artificial Sequence: Synthetic peptide; note = XENP21503 vlCDR1
KSSQSLLDSDGKTYLN

SEQ ID NO: 38312 - protein, 6 aa, synthetic construct
  source 1..6: note = Description of Artificial Sequence: Synthetic peptide; note = XENP21503 vlCDR2
VSKLDS

SEQ ID NO: 38313 - protein, 9 aa, synthetic construct
  source 1..9: note = Description of Artificial Sequence: Synthetic peptide; note = XENP21503 vlCDR3
WQGTHFPYT

SEQ ID NO: 38314 - protein, 113 aa, synthetic construct; identical to SEQ ID NO: 36628
  source 1..113: note = Description of Artificial Sequence: Synthetic polypeptide; note = VH of XENP21492

SEQ ID NO: 38315 - protein, 5 aa, synthetic construct
  source 1..5: note = Description of Artificial Sequence: Synthetic peptide; note = XENP21492 vhCDR1
SFDMS

SEQ ID NO: 38316 - protein, 17 aa, synthetic construct
  source 1..17: note = Description of Artificial Sequence: Synthetic peptide; note = XENP21492 vhCDR2
YISSDGASTFYPDTMKG

SEQ ID NO: 38317 - protein, 4 aa, synthetic construct
  source 1..4: note = Description of Artificial Sequence: Synthetic peptide; note = XENP21492 vhCDR3
LGAY

SEQ ID NO: 38318 - protein, 111 aa, synthetic construct; identical to SEQ ID NO: 36633
  source 1..111: note = Description of Artificial Sequence: Synthetic polypeptide; note = VL of XENP21492

SEQ ID NO: 38319 - protein, 14 aa, synthetic construct
  source 1..14: note = Description of Artificial Sequence: Synthetic peptide; note = XENP21492 vlCDR1
RASESVEYYGTSLQ

SEQ ID NO: 38320 - protein, 7 aa, synthetic construct
  source 1..7: note = Description of Artificial Sequence: Synthetic peptide; note = XENP21492 vlCDR2
AASNVES

SEQ ID NO: 38321 - protein, 9 aa, synthetic construct
  source 1..9: note = Description of Artificial Sequence: Synthetic peptide; note = XENP21492 vlCDR3
QQSRKVPWT

SEQ ID NO: 38322 - protein, 117 aa, synthetic construct; identical to SEQ ID NO: 36368
  source 1..117: note = Description of Artificial Sequence: Synthetic polypeptide; note = VH of XENP21189

SEQ ID NO: 38323 - protein, 5 aa, synthetic construct
  source 1..5: note = Description of Artificial Sequence: Synthetic peptide; note = XENP21189 vhCDR1
GYGVN

SEQ ID NO: 38324 - protein, 16 aa, synthetic construct
  source 1..16: note = Description of Artificial Sequence: Synthetic peptide; note = XENP21189 vhCDR2
MIWGDGSTDYNSALKS

SEQ ID NO: 38325 - protein, 9 aa, synthetic construct
  source 1..9: note = Description of Artificial Sequence: Synthetic peptide; note = XENP21189 vhCDR3
SYYTSDEDY

SEQ ID NO: 38326 - protein, 112 aa, synthetic construct; identical to SEQ ID NO: 36513
  source 1..112: note = Description of Artificial Sequence: Synthetic polypeptide; note = VL of XENP21189

SEQ ID NO: 38327 - protein, 17 aa, synthetic construct
  source 1..17: note = Description of Artificial Sequence: Synthetic peptide; note = XENP21189 vlCDR1
KSSQSLLNSRTRKNYLA

SEQ ID NO: 38328 - protein, 7 aa, synthetic construct
  source 1..7: note = Description of Artificial Sequence: Synthetic peptide; note = XENP21189 vlCDR2
WASTRES

SEQ ID NO: 38329 - protein, 8 aa, synthetic construct
  source 1..8: note = Description of Artificial Sequence: Synthetic peptide; note = XENP21189 vlCDR3
KQSYSLRT

SEQ ID NO: 38330 - protein, 117 aa, synthetic construct; identical to SEQ ID NO: 36638
  source 1..117: note = Description of Artificial Sequence: Synthetic polypeptide; note = VH of XENP21493

SEQ ID NO: 38331 - protein, 5 aa, synthetic construct
  source 1..5: note = Description of Artificial Sequence: Synthetic peptide; note = XENP21493 vhCDR1
GYGVN

SEQ ID NO: 38332 - protein, 16 aa, synthetic construct
  source 1..16: note = Description of Artificial Sequence: Synthetic peptide; note = XENP21493 vhCDR2
MIWGDGSTDYNSALKS

SEQ ID NO: 38333 - protein, 9 aa, synthetic construct
  source 1..9: note = Description of Artificial Sequence: Synthetic peptide; note = XENP21493 vhCDR3
SYYTSDEDY

SEQ ID NO: 38334 - protein, 107 aa, synthetic construct; identical to SEQ ID NO: 36643
  source 1..107: note = Description of Artificial Sequence: Synthetic polypeptide; note = VL of XENP21493

SEQ ID NO: 38335 - protein, 11 aa, synthetic construct
  source 1..11: note = Description of Artificial Sequence: Synthetic peptide; note = XENP21493 vlCDR1
KASQNVGSNVA

SEQ ID NO: 38336 - protein, 7 aa, synthetic construct
  source 1..7: note = Description of Artificial Sequence: Synthetic peptide; note = XENP21493 vlCDR2
SASFRYS

SEQ ID NO: 38337 - protein, 9 aa, synthetic construct
  source 1..9: note = Description of Artificial Sequence: Synthetic peptide; note = XENP21493 vlCDR3
QQYNSYPYT

SEQ ID NO: 38338 - protein, 117 aa, synthetic construct; identical to SEQ ID NO: 36648
  source 1..117: note = Description of Artificial Sequence: Synthetic polypeptide; note = VH of XENP21494

SEQ ID NO: 38339 - protein, 5 aa, synthetic construct
  source 1..5: note = Description of Artificial Sequence: Synthetic peptide; note = XENP21494 vhCDR1
SYGVH

SEQ ID NO: 38340 - protein, 16 aa, synthetic construct
  source 1..16: note = Description of Artificial Sequence: Synthetic peptide; note = XENP21494 vhCDR2
VIWSGGSTEYNAAFIS

SEQ ID NO: 38341 - protein, 9 aa, synthetic construct
  source 1..9: note = Description of Artificial Sequence: Synthetic peptide; note = XENP21494 vhCDR3
GGLLSPFDY

SEQ ID NO: 38342 - protein, 111 aa, synthetic construct; identical to SEQ ID NO: 36633
  source 1..111: note = Description of Artificial Sequence: Synthetic polypeptide; note = VL of XENP21494

SEQ ID NO: 38343 - protein, 15 aa, synthetic construct
  source 1..15: note = Description of Artificial Sequence: Synthetic peptide; note = XENP21494 vlCDR1
RASESVEYYGTSLMQ

SEQ ID NO: 38344 - protein, 7 aa, synthetic construct
  source 1..7: note = Description of Artificial Sequence: Synthetic peptide; note = XENP21494 vlCDR2
AASNVES

SEQ ID NO: 38345 - protein, 9 aa, synthetic construct
  source 1..9: note = Description of Artificial Sequence: Synthetic peptide; note = XENP21494 vlCDR3
QQSRKVPWT

SEQ ID NO: 38346 - protein, 123 aa, synthetic construct; identical to SEQ ID NO: 36658
  source 1..123: note = Description of Artificial Sequence: Synthetic polypeptide; note = VH of XENP21495

SEQ ID NO: 38347 - protein, 5 aa, synthetic construct
  source 1..5: note = Description of Artificial Sequence: Synthetic peptide; note = XENP21495 vhCDR1
RYWMS

SEQ ID NO: 38348 - protein, 17 aa, synthetic construct
  source 1..17: note = Description of Artificial Sequence: Synthetic peptide; note = XENP21495 vhCDR2
EINPDSSTINYTPSLKD

SEQ ID NO: 38349 - protein, 14 aa, synthetic construct
  source 1..14: note = Description of Artificial Sequence: Synthetic peptide; note = XENP21495 vhCDR3
PNGYYVGTIFPFAY

SEQ ID NO: 38350 - protein, 110 aa, synthetic construct
  source 1..110: note = Description of Artificial Sequence: Synthetic polypeptide; note = VL of XENP21495
QAVVTQESALTTSPGETVTLTCRSSTGAVTTSNYANWVQEKPDHLFTGLIGGTNNRAPGVPARFSGSLIGDKAALTITGAQTEDEAIYFCALWYSNHWVFGGGTKLTVLG

SEQ ID NO: 38351 - protein, 14 aa, synthetic construct
  source 1..14: note = Description of Artificial Sequence: Synthetic peptide; note = XENP21495 vlCDR1
RSSTGAVTTSNYAN

SEQ ID NO: 38352 - protein, 7 aa, synthetic construct
  source 1..7: note = Description of Artificial Sequence: Synthetic peptide; note = XENP21495 vlCDR2
GTNNRAP

SEQ ID NO: 38353 - protein, 9 aa, synthetic construct
  source 1..9: note = Description of Artificial Sequence: Synthetic peptide; note = XENP21495 vlCDR3
ALWYSNHWV

SEQ ID NO: 38354 - protein, 118 aa, synthetic construct; identical to SEQ ID NO: 20836
  source 1..118: note = Description of Artificial Sequence: Synthetic polypeptide; note = VH of XENP21496

SEQ ID NO: 38355 - protein, 5 aa, synthetic construct
  source 1..5: note = Description of Artificial Sequence: Synthetic peptide; note = XENP21496 vhCDR1
SYAVN

SEQ ID NO: 38356 - protein, 16 aa, synthetic construct
  source 1..16: note = Description of Artificial Sequence: Synthetic peptide; note = XENP21496 vhCDR2
VIWSGGSTDYNAAFIS

SEQ ID NO: 38357 - protein, 10 aa, synthetic construct
  source 1..10: note = Description of Artificial Sequence: Synthetic peptide; note = XENP21496 vhCDR3
LYYRYDGFDY

SEQ ID NO: 38358 - protein, 107 aa, synthetic construct; identical to SEQ ID NO: 20841
  source 1..107: note = Description of Artificial Sequence: Synthetic polypeptide; note = VL of XENP21496

SEQ ID NO: 38359 - protein, 11 aa, synthetic construct
  source 1..11: note = Description of Artificial Sequence: Synthetic peptide; note = XENP21496 vlCDR1
KASQNVGTHVA

SEQ ID NO: 38360 - protein, 7 aa, synthetic construct
  source 1..7: note = Description of Artificial Sequence: Synthetic peptide; note = XENP21496 vlCDR2
SASYRYS

SEQ ID NO: 38361 - protein, 9 aa, synthetic construct
  source 1..9: note = Description of Artificial Sequence: Synthetic peptide; note = XENP21496 vlCDR3
QQYNSYPLT

SEQ ID NO: 38362 - protein, 118 aa, synthetic construct; identical to SEQ ID NO: 20846
  source 1..118: note = Description of Artificial Sequence: Synthetic polypeptide; note = VH of XENP21501

SEQ ID NO: 38363 - protein, 5 aa, synthetic construct
  source 1..5: note = Description of Artificial Sequence: Synthetic peptide; note = XENP21501 vhCDR1
SYAVN

SEQ ID NO: 38364 - protein, 16 aa, synthetic construct
  source 1..16: note = Description of Artificial Sequence: Synthetic peptide; note = XENP21501 vhCDR2
VIWSGGSTDYNAAFIS

SEQ ID NO: 38365 - protein, 10 aa, synthetic construct
  source 1..10: note = Description of Artificial Sequence: Synthetic peptide; note = XENP21501 vhCDR3
LYYRYDGFDY

SEQ ID NO: 38366 - protein, 107 aa, synthetic construct; identical to SEQ ID NO: 20841
  source 1..107: note = Description of Artificial Sequence: Synthetic polypeptide; note = VL of XENP21501

SEQ ID NO: 38367 - protein, 11 aa, synthetic construct
  source 1..11: note = Description of Artificial Sequence: Synthetic peptide; note = XENP21501 vlCDR1
KASQNVGTHVA

SEQ ID NO: 38368 - protein, 7 aa, synthetic construct
  source 1..7: note = Description of Artificial Sequence: Synthetic peptide; note = XENP21501 vlCDR2
SASYRYS

SEQ ID NO: 38369 - protein, 9 aa, synthetic construct
  source 1..9: note = Description of Artificial Sequence: Synthetic peptide; note = XENP21501 vlCDR3
QQYNSYPLT

SEQ ID NO: 38370 - protein, 117 aa, synthetic construct; identical to SEQ ID NO: 36688
  source 1..117: note = Description of Artificial Sequence: Synthetic polypeptide; note = VH of XENP21502

SEQ ID NO: 38371 - protein, 5 aa, synthetic construct
  source 1..5: note = Description of Artificial Sequence: Synthetic peptide; note = XENP21502 vhCDR1
RYAMS

SEQ ID NO: 38372 - protein, 16 aa, synthetic construct
  source 1..16: note = Description of Artificial Sequence: Synthetic peptide; note = XENP21502 vhCDR2
SISSGGSTYYPDSVQG

SEQ ID NO: 38373 - protein, 9 aa, synthetic construct
  source 1..9: note = Description of Artificial Sequence: Synthetic peptide; note = XENP21502 vhCDR3
GDYEGYFDY

SEQ ID NO: 38374 - protein, 113 aa, synthetic construct; identical to SEQ ID NO: 36693
  source 1..113: note = Description of Artificial Sequence: Synthetic polypeptide; note = VL of XENP21502

SEQ ID NO: 38375 - protein, 17 aa, synthetic construct
  source 1..17: note = Description of Artificial Sequence: Synthetic peptide; note = XENP21502 vlCDR1
KSSQSLLNSINQKNYLA

SEQ ID NO: 38376 - protein, 7 aa, synthetic construct
  source 1..7: note = Description of Artificial Sequence: Synthetic peptide; note = XENP21502 vlCDR2
FASTRES

SEQ ID NO: 38377 - protein, 9 aa, synthetic construct
  source 1..9: note = Description of Artificial Sequence: Synthetic peptide; note = XENP21502 vlCDR3
QQHYSTPLT

SEQ ID NO: 38378 - protein, 447 aa, synthetic construct; identical to SEQ ID NO: 23356
  source 1..447: note = Description of Artificial Sequence: Synthetic polypeptide; note = XENP019738 ipilimumab_H3L0-1G6_L1.210_H1.288 Fab-Fc Heavy Chain

SEQ ID NO: 38379 - protein, 118 aa, synthetic construct; identical to SEQ ID NO: 139
  source 1..118: note = Description of Artificial Sequence: Synthetic polypeptide; note = VH of XENP019738

SEQ ID NO: 38380 - protein, 5 aa, synthetic construct
  source 1..5: note = Description of Artificial Sequence: Synthetic peptide; note = XENP019738 vhCDR1
SYTMH

SEQ ID NO: 38381 - protein, 17 aa, synthetic construct
  source 1..17: note = Description of Artificial Sequence: Synthetic peptide; note = XENP019738 vhCDR2
FISYDGNNKYYADSVKG

SEQ ID NO: 38382 - protein, 9 aa, synthetic construct
  source 1..9: note = Description of Artificial Sequence: Synthetic peptide; note = XENP019738 vhCDR3
TGWLGPFDY

SEQ ID NO: 38383 - protein, 480 aa, synthetic construct; identical to SEQ ID NO: 23381
  source 1..480: note = Description of Artificial Sequence: Synthetic polypeptide; note = XENP019738 ipilimumab_H3L0-1G6_L1.210_H1.288 scFv-Fc Heavy Chain

SEQ ID NO: 38384 - protein, 107 aa, synthetic construct; identical to SEQ ID NO: 11359
  source 1..107: note = Description of Artificial Sequence: Synthetic polypeptide; note = VH of XENP019738

SEQ ID NO: 38385 - protein, 122 aa, synthetic construct; identical to SEQ ID NO: 11358
  source 1..122: note = Description of Artificial Sequence: Synthetic polypeptide; note = VL of XENP019738

SEQ ID NO: 38386 - protein, 231 aa, synthetic construct; identical to SEQ ID NO: 21532
  source 1..231: note = Description of Artificial Sequence: Synthetic polypeptide; note = Fc chain of XENP019738

SEQ ID NO: 38387 - protein, 11 aa, synthetic construct
  source 1..11: note = Description of Artificial Sequence: Synthetic peptide; note = XENP019738 vhCDR1
RASQSVGNDVA

SEQ ID NO: 38388 - protein, 7 aa, synthetic construct
  source 1..7: note = Description of Artificial Sequence: Synthetic peptide; note = XENP019738 vhCDR2
YASHRYT

SEQ ID NO: 38389 - protein, 9 aa, synthetic construct
  source 1..9: note = Description of Artificial Sequence: Synthetic peptide; note = XENP019738 vhCDR3
QQDFSSPRT

SEQ ID NO: 38390 - protein, 5 aa, synthetic construct
  source 1..5: note = Description of Artificial Sequence: Synthetic peptide; note = XENP019738 vlCDR1
NYWMN

SEQ ID NO: 38391 - protein, 19 aa, synthetic construct
  source 1..19: note = Description of Artificial Sequence: Synthetic peptide; note = XENP019738 vlCDR2
EIRLYSNNYATHYAESVKG

SEQ ID NO: 38392 - protein, 11 aa, synthetic construct
  source 1..11: note = Description of Artificial Sequence: Synthetic peptide; note = XENP019738 vlCDR3
YYGNYGGYFDV

SEQ ID NO: 38393 - protein, 215 aa, synthetic construct; identical to SEQ ID NO: 2924
  source 1..215: note = Description of Artificial Sequence: Synthetic polypeptide; note = XENP019738 ipilimumab_H3L0-1G6_L1.210_H1.288 Light Chain

SEQ ID NO: 38394 - protein, 108 aa, synthetic construct; identical to SEQ ID NO: 23
  source 1..108: note = Description of Artificial Sequence: Synthetic polypeptide; note = VL of XENP019738

SEQ ID NO: 38395 - protein, 12 aa, synthetic construct
  source 1..12: note = Description of Artificial Sequence: Synthetic peptide; note = XENP019738 vlCDR1
RASQSVGSSYLA

SEQ ID NO: 38396 - protein, 7 aa, synthetic construct
  source 1..7: note = Description of Artificial Sequence: Synthetic peptide; note = XENP019738 vlCDR2
GAFSRAT

SEQ ID NO: 38397 - protein, 9 aa, synthetic construct
  source 1..9: note = Description of Artificial Sequence: Synthetic peptide; note = XENP019738 vlCDR3
QQYGSSPWT

SEQ ID NO: 38398 - protein, 447 aa, synthetic construct; identical to SEQ ID NO: 23356
  source 1..447: note = Description of Artificial Sequence: Synthetic polypeptide; note = XENP019739 ipilimumab_H3L0-1G6_H1.279_L1.194 Fab-Fc Heavy Chain

SEQ ID NO: 38399 - protein, 118 aa, synthetic construct; identical to SEQ ID NO: 139
  source 1..118: note = Description of Artificial Sequence: Synthetic polypeptide; note = VH of XENP019739

SEQ ID NO: 38400 - protein, 5 aa, synthetic construct
  source 1..5: note = Description of Artificial Sequence: Synthetic peptide; note = XENP019739 vhCDR1
SYTMH

SEQ ID NO: 38401 - protein, 17 aa, synthetic construct
  source 1..17: note = Description of Artificial Sequence: Synthetic peptide; note = XENP019739 vhCDR2
FISYDGNNKYYADSVKG

SEQ ID NO: 38402 - protein, 9 aa, synthetic construct
  source 1..9: note = Description of Artificial Sequence: Synthetic peptide; note = XENP019739 vhCDR3
TGWLGPFDY

SEQ ID NO: 38403 - protein, 480 aa, synthetic construct; identical to SEQ ID NO: 23401
  source 1..480: note = Description of Artificial Sequence: Synthetic polypeptide; note = XENP019739 ipilimumab_H3L0-1G6_H1.279_L1.194 scFv-Fc Heavy Chain

SEQ ID NO: 38404 - protein, 122 aa, synthetic construct; identical to SEQ ID NO: 10908
  source 1..122: note = Description of Artificial Sequence: Synthetic polypeptide; note = VH of XENP019739

SEQ ID NO: 38405 - protein, 107 aa, synthetic construct; identical to SEQ ID NO: 10999
  source 1..107: note = Description of Artificial Sequence: Synthetic polypeptide; note = VL of XENP019739

SEQ ID NO: 38406 - protein, 231 aa, synthetic construct; identical to SEQ ID NO: 21532
  source 1..231: note = Description of Artificial Sequence: Synthetic polypeptide; note = Fc chain of XENP019739

SEQ ID NO: 38407 - protein, 5 aa, synthetic construct
  source 1..5: note = Description of Artificial Sequence: Synthetic peptide; note = XENP019739 vhCDR1
NYWMN

SEQ ID NO: 38408 - protein, 19 aa, synthetic construct
  source 1..19: note = Description of Artificial Sequence: Synthetic peptide; note = XENP019739 vhCDR2
EIRLYSNNYATHYAESVKG

SEQ ID NO: 38409 - protein, 11 aa, synthetic construct
  source 1..11: note = Description of Artificial Sequence: Synthetic peptide; note = XENP019739 vhCDR3
YYGNYGGYFDV

SEQ ID NO: 38410 - protein, 11 aa, synthetic construct
  source 1..11: note = Description of Artificial Sequence: Synthetic peptide; note = XENP019739 vlCDR1
RASQSVGNDVA

SEQ ID NO: 38411 - protein, 7 aa, synthetic construct
  source 1..7: note = Description of Artificial Sequence: Synthetic peptide; note = XENP019739 vlCDR2
YASHRYT

SEQ ID NO: 38412 - protein, 9 aa, synthetic construct
  source 1..9: note = Description of Artificial Sequence: Synthetic peptide; note = XENP019739 vlCDR3
QQDFSSPRT

SEQ ID NO: 38413 - protein, 215 aa, synthetic construct; identical to SEQ ID NO: 2924
  source 1..215: note = Description of Artificial Sequence: Synthetic polypeptide; note = XENP019739 ipilimumab_H3L0-1G6_H1.279_L1.194 Light Chain

SEQ ID NO: 38414 - protein, 108 aa, synthetic construct; identical to SEQ ID NO: 23
  source 1..108: note = Description of Artificial Sequence: Synthetic polypeptide; note = VL of XENP019739

SEQ ID NO: 38415 - protein, 12 aa, synthetic construct
  source 1..12: note = Description of Artificial Sequence: Synthetic peptide; note = XENP019739 vlCDR1
RASQSVGSSYLA

SEQ ID NO: 38416 - protein, 7 aa, synthetic construct
  source 1..7: note = Description of Artificial Sequence: Synthetic peptide; note = XENP019739 vlCDR2
GAFSRAT

SEQ ID NO: 38417 - protein, 9 aa, synthetic construct
  source 1..9: note = Description of Artificial Sequence: Synthetic peptide; note = XENP019739 vlCDR3
QQYGSSPWT

SEQ ID NO: 38418 - protein, 447 aa, synthetic construct; identical to SEQ ID NO: 23356
  source 1..447: note = Description of Artificial Sequence: Synthetic polypeptide; note = XENP019741 ipilimumab_H3L0-1G6_L1.194_H1.279 Fab-Fc Heavy Chain

SEQ ID NO: 38419 - protein, 118 aa, synthetic construct; identical to SEQ ID NO: 139
  source 1..118: note = Description of Artificial Sequence: Synthetic polypeptide; note = VH of XENP019741

SEQ ID NO: 38420 - protein, 5 aa, synthetic construct
  source 1..5: note = Description of Artificial Sequence: Synthetic peptide; note = XENP019741 vhCDR1
SYTMH

SEQ ID NO: 38421 - protein, 17 aa, synthetic construct
  source 1..17: note = Description of Artificial Sequence: Synthetic peptide; note = XENP019741 vhCDR2
FISYDGNNKYYADSVKG

SEQ ID NO: 38422 - protein, 9 aa, synthetic construct
  source 1..9: note = Description of Artificial Sequence: Synthetic peptide; note = XENP019741 vhCDR3
TGWLGPFDY

SEQ ID NO: 38423 - protein, 480 aa, synthetic construct; identical to SEQ ID NO: 23221
  source 1..480: note = Description of Artificial Sequence: Synthetic polypeptide; note = XENP019741 ipilimumab_H3L0-1G6_L1.194_H1.279 scFv-Fc Heavy Chain

SEQ ID NO: 38424 - protein, 107 aa, synthetic construct; identical to SEQ ID NO: 10999
  source 1..107: note = Description of Artificial Sequence: Synthetic polypeptide; note = VH of XENP019741

SEQ ID NO: 38425 - protein, 122 aa, synthetic construct; identical to SEQ ID NO: 10908
  source 1..122: note = Description of Artificial Sequence: Synthetic polypeptide; note = VL of XENP019741

SEQ ID NO: 38426 - protein, 231 aa, synthetic construct; identical to SEQ ID NO: 21532
  source 1..231: note = Description of Artificial Sequence: Synthetic polypeptide; note = Fc chain of XENP019741

SEQ ID NO: 38427 - protein, 11 aa, synthetic construct
  source 1..11: note = Description of Artificial Sequence: Synthetic peptide; note = XENP019741 vhCDR1
RASQSVGNDVA

SEQ ID NO: 38428 - protein, 7 aa, synthetic construct
  source 1..7: note = Description of Artificial Sequence: Synthetic peptide; note = XENP019741 vhCDR2
YASHRYT

SEQ ID NO: 38429 - protein, 9 aa, synthetic construct
  source 1..9: note = Description of Artificial Sequence: Synthetic peptide; note = XENP019741 vhCDR3
QQDFSSPRT

SEQ ID NO: 38430 - protein, 5 aa, synthetic construct
  source 1..5: note = Description of Artificial Sequence: Synthetic peptide; note = XENP019741 vlCDR1
NYWMN

SEQ ID NO: 38431 - protein, 19 aa, synthetic construct
  source 1..19: note = Description of Artificial Sequence: Synthetic peptide; note = XENP019741 vlCDR2
EIRLYSNNYATHYAESVKG

SEQ ID NO: 38432 - protein, 11 aa, synthetic construct
  source 1..11: note = Description of Artificial Sequence: Synthetic peptide; note = XENP019741 vlCDR3
YYGNYGGYFDV

SEQ ID NO: 38433 - protein, 215 aa, synthetic construct; identical to SEQ ID NO: 2924
  source 1..215: note = Description of Artificial Sequence: Synthetic polypeptide; note = XENP019741 ipilimumab_H3L0-1G6_L1.194_H1.279 Light Chain

SEQ ID NO: 38434 - protein, 108 aa, synthetic construct; identical to SEQ ID NO: 23
  source 1..108: note = Description of Artificial Sequence: Synthetic polypeptide; note = VL of XENP019741

SEQ ID NO: 38435 - protein, 12 aa, synthetic construct
  source 1..12: note = Description of Artificial Sequence: Synthetic peptide; note = XENP019741 vlCDR1
RASQSVGSSYLA

SEQ ID NO: 38436 - protein, 7 aa, synthetic construct
  source 1..7: note = Description of Artificial Sequence: Synthetic peptide; note = XENP019741 vlCDR2
GAFSRAT

SEQ ID NO: 38437 - protein, 9 aa, synthetic construct
  source 1..9: note = Description of Artificial Sequence: Synthetic peptide; note = XENP019741 vlCDR3
QQYGSSPWT

SEQ ID NO: 38438 - protein, 447 aa, synthetic construct; identical to SEQ ID NO: 23356
  source 1..447: note = Description of Artificial Sequence: Synthetic polypeptide; note = XENP020053 ipilimumab_H3L0.22-1G6_L1.194_H1.279 Fab-Fc  Heavy Chain

SEQ ID NO: 38439 - protein, 118 aa, synthetic construct; identical to SEQ ID NO: 139
  source 1..118: note = Description of Artificial Sequence: Synthetic polypeptide; note = VH of XENP020053

SEQ ID NO: 38440 - protein, 5 aa, synthetic construct
  source 1..5: note = Description of Artificial Sequence: Synthetic peptide; note = XENP020053 vhCDR1
SYTMH

SEQ ID NO: 38441 - protein, 17 aa, synthetic construct
  source 1..17: note = Description of Artificial Sequence: Synthetic peptide; note = XENP020053 vhCDR2
FISYDGNNKYYADSVKG

SEQ ID NO: 38442 - protein, 9 aa, synthetic construct
  source 1..9: note = Description of Artificial Sequence: Synthetic peptide; note = XENP020053 vhCDR3
TGWLGPFDY

SEQ ID NO: 38443 - protein, 480 aa, synthetic construct; identical to SEQ ID NO: 23221
  source 1..480: note = Description of Artificial Sequence: Synthetic polypeptide; note = XENP020053 ipilimumab_H3L0.22-1G6_L1.194_H1.279 scFv-Fc Heavy Chain

SEQ ID NO: 38444 - protein, 107 aa, synthetic construct; identical to SEQ ID NO: 10999
  source 1..107: note = Description of Artificial Sequence: Synthetic polypeptide; note = VH of XENP020053

SEQ ID NO: 38445 - protein, 122 aa, synthetic construct; identical to SEQ ID NO: 10908
  source 1..122: note = Description of Artificial Sequence: Synthetic polypeptide; note = VL of XENP020053

SEQ ID NO: 38446 - protein, 231 aa, synthetic construct; identical to SEQ ID NO: 21532
  source 1..231: note = Description of Artificial Sequence: Synthetic polypeptide; note = Fc chain of XENP020053

SEQ ID NO: 38447 - protein, 11 aa, synthetic construct
  source 1..11: note = Description of Artificial Sequence: Synthetic peptide; note = XENP020053 vhCDR1
RASQSVGNDVA

SEQ ID NO: 38448 - protein, 7 aa, synthetic construct
  source 1..7: note = Description of Artificial Sequence: Synthetic peptide; note = XENP020053 vhCDR2
YASHRYT

SEQ ID NO: 38449 - protein, 9 aa, synthetic construct
  source 1..9: note = Description of Artificial Sequence: Synthetic peptide; note = XENP020053 vhCDR3
QQDFSSPRT

SEQ ID NO: 38450 - protein, 5 aa, synthetic construct
  source 1..5: note = Description of Artificial Sequence: Synthetic peptide; note = XENP020053 vlCDR1
NYWMN

SEQ ID NO: 38451 - protein, 19 aa, synthetic construct
  source 1..19: note = Description of Artificial Sequence: Synthetic peptide; note = XENP020053 vlCDR2
EIRLYSNNYATHYAESVKG

SEQ ID NO: 38452 - protein, 11 aa, synthetic construct
  source 1..11: note = Description of Artificial Sequence: Synthetic peptide; note = XENP020053 vlCDR3
YYGNYGGYFDV

SEQ ID NO: 38453 - protein, 215 aa, synthetic construct; identical to SEQ ID NO: 4504
  source 1..215: note = Description of Artificial Sequence: Synthetic polypeptide; note = XENP020053 ipilimumab_H3L0.22-1G6_L1.194_H1.279 Light Chain

SEQ ID NO: 38454 - protein, 108 aa, synthetic construct; identical to SEQ ID NO: 1607
  source 1..108: note = Description of Artificial Sequence: Synthetic polypeptide; note = VL of XENP020053

SEQ ID NO: 38455 - protein, 12 aa, synthetic construct
  source 1..12: note = Description of Artificial Sequence: Synthetic peptide; note = XENP020053 vlCDR1
RASQSVSSSYLA

SEQ ID NO: 38456 - protein, 7 aa, synthetic construct
  source 1..7: note = Description of Artificial Sequence: Synthetic peptide; note = XENP020053 vlCDR2
GAFSRAT

SEQ ID NO: 38457 - protein, 9 aa, synthetic construct
  source 1..9: note = Description of Artificial Sequence: Synthetic peptide; note = XENP020053 vlCDR3
QQYGSSPWT

SEQ ID NO: 38458 - protein, 447 aa, synthetic construct; identical to SEQ ID NO: 23356
  source 1..447: note = Description of Artificial Sequence: Synthetic polypeptide; note = XENP020066 ipilimumab_H3_L0.22-1G6_H1.279_L1.194 Fab-Fc Heavy Chain

SEQ ID NO: 38459 - protein, 118 aa, synthetic construct; identical to SEQ ID NO: 139
  source 1..118: note = Description of Artificial Sequence: Synthetic polypeptide; note = VH of XENP020066

SEQ ID NO: 38460 - protein, 5 aa, synthetic construct
  source 1..5: note = Description of Artificial Sequence: Synthetic peptide; note = XENP020066 vhCDR1
SYTMH

SEQ ID NO: 38461 - protein, 17 aa, synthetic construct
  source 1..17: note = Description of Artificial Sequence: Synthetic peptide; note = XENP020066 vhCDR2
FISYDGNNKYYADSVKG

SEQ ID NO: 38462 - protein, 9 aa, synthetic construct
  source 1..9: note = Description of Artificial Sequence: Synthetic peptide; note = XENP020066 vhCDR3
TGWLGPFDY

SEQ ID NO: 38463 - protein, 480 aa, synthetic construct; identical to SEQ ID NO: 23401
  source 1..480: note = Description of Artificial Sequence: Synthetic polypeptide; note = XENP020066 ipilimumab_H3_L0.22-1G6_H1.279_L1.194 scFv-Fc Heavy Chain

SEQ ID NO: 38464 - protein, 122 aa, synthetic construct; identical to SEQ ID NO: 10908
  source 1..122: note = Description of Artificial Sequence: Synthetic polypeptide; note = VH of XENP020066

SEQ ID NO: 38465 - protein, 107 aa, synthetic construct; identical to SEQ ID NO: 10999
  source 1..107: note = Description of Artificial Sequence: Synthetic polypeptide; note = VL of XENP020066

SEQ ID NO: 38466 - protein, 231 aa, synthetic construct; identical to SEQ ID NO: 21532
  source 1..231: note = Description of Artificial Sequence: Synthetic polypeptide; note = Fc chain of XENP020066

SEQ ID NO: 38467 - protein, 5 aa, synthetic construct
  source 1..5: note = Description of Artificial Sequence: Synthetic peptide; note = XENP020066 vhCDR1
NYWMN

SEQ ID NO: 38468 - protein, 19 aa, synthetic construct
  source 1..19: note = Description of Artificial Sequence: Synthetic peptide; note = XENP020066 vhCDR2
EIRLYSNNYATHYAESVKG

SEQ ID NO: 38469 - protein, 11 aa, synthetic construct
  source 1..11: note = Description of Artificial Sequence: Synthetic peptide; note = XENP020066 vhCDR3
YYGNYGGYFDV

SEQ ID NO: 38470 - protein, 11 aa, synthetic construct
  source 1..11: note = Description of Artificial Sequence: Synthetic peptide; note = XENP020066 vlCDR1
RASQSVGNDVA

SEQ ID NO: 38471 - protein, 7 aa, synthetic construct
  source 1..7: note = Description of Artificial Sequence: Synthetic peptide; note = XENP020066 vlCDR2
YASHRYT

SEQ ID NO: 38472 - protein, 9 aa, synthetic construct
  source 1..9: note = Description of Artificial Sequence: Synthetic peptide; note = XENP020066 vlCDR3
QQDFSSPRT

SEQ ID NO: 38473 - protein, 215 aa, synthetic construct; identical to SEQ ID NO: 4504
  source 1..215: note = Description of Artificial Sequence: Synthetic polypeptide; note = XENP020066 ipilimumab_H3_L0.22-1G6_H1.279_L1.194 Light Chain

SEQ ID NO: 38474 - protein, 108 aa, synthetic construct; identical to SEQ ID NO: 1607
  source 1..108: note = Description of Artificial Sequence: Synthetic polypeptide; note = VL of XENP020066

SEQ ID NO: 38475 - protein, 12 aa, synthetic construct
  source 1..12: note = Description of Artificial Sequence: Synthetic peptide; note = XENP020066 vlCDR1
RASQSVSSSYLA

SEQ ID NO: 38476 - protein, 7 aa, synthetic construct
  source 1..7: note = Description of Artificial Sequence: Synthetic peptide; note = XENP020066 vlCDR2
GAFSRAT

SEQ ID NO: 38477 - protein, 9 aa, synthetic construct
  source 1..9: note = Description of Artificial Sequence: Synthetic peptide; note = XENP020066 vlCDR3
QQYGSSPWT

SEQ ID NO: 38478 - protein, 447 aa, synthetic construct; identical to SEQ ID NO: 23356
  source 1..447: note = Description of Artificial Sequence: Synthetic polypeptide; note = XENP020130 ipilimumab_H3_L0.22-1G6_L1.210_H1.288 Fab-Fc Heavy Chain

SEQ ID NO: 38479 - protein, 118 aa, synthetic construct; identical to SEQ ID NO: 139
  source 1..118: note = Description of Artificial Sequence: Synthetic polypeptide; note = VH of XENP020130

SEQ ID NO: 38480 - protein, 5 aa, synthetic construct
  source 1..5: note = Description of Artificial Sequence: Synthetic peptide; note = XENP020130 vhCDR1
SYTMH

SEQ ID NO: 38481 - protein, 17 aa, synthetic construct
  source 1..17: note = Description of Artificial Sequence: Synthetic peptide; note = XENP020130 vhCDR2
FISYDGNNKYYADSVKG

SEQ ID NO: 38482 - protein, 9 aa, synthetic construct
  source 1..9: note = Description of Artificial Sequence: Synthetic peptide; note = XENP020130 vhCDR3
TGWLGPFDY

SEQ ID NO: 38483 - protein, 480 aa, synthetic construct; identical to SEQ ID NO: 23381
  source 1..480: note = Description of Artificial Sequence: Synthetic polypeptide; note = XENP020130 ipilimumab_H3_L0.22-1G6_L1.210_H1.288 scFv-Fc Heavy Chain

SEQ ID NO: 38484 - protein, 107 aa, synthetic construct; identical to SEQ ID NO: 11359
  source 1..107: note = Description of Artificial Sequence: Synthetic polypeptide; note = VH of XENP020130

SEQ ID NO: 38485 - protein, 122 aa, synthetic construct; identical to SEQ ID NO: 11358
  source 1..122: note = Description of Artificial Sequence: Synthetic polypeptide; note = VL of XENP020130

SEQ ID NO: 38486 - protein, 231 aa, synthetic construct; identical to SEQ ID NO: 21532
  source 1..231: note = Description of Artificial Sequence: Synthetic polypeptide; note = Fc chain of XENP020130

SEQ ID NO: 38487 - protein, 11 aa, synthetic construct
  source 1..11: note = Description of Artificial Sequence: Synthetic peptide; note = XENP020130 vhCDR1
RASQSVGNDVA

SEQ ID NO: 38488 - protein, 7 aa, synthetic construct
  source 1..7: note = Description of Artificial Sequence: Synthetic peptide; note = XENP020130 vhCDR2
YASHRYT

SEQ ID NO: 38489 - protein, 9 aa, synthetic construct
  source 1..9: note = Description of Artificial Sequence: Synthetic peptide; note = XENP020130 vhCDR3
QQDFSSPRT

SEQ ID NO: 38490 - protein, 5 aa, synthetic construct
  source 1..5: note = Description of Artificial Sequence: Synthetic peptide; note = XENP020130 vlCDR1
NYWMN

SEQ ID NO: 38491 - protein, 19 aa, synthetic construct
  source 1..19: note = Description of Artificial Sequence: Synthetic peptide; note = XENP020130 vlCDR2
EIRLYSNNYATHYAESVKG

SEQ ID NO: 38492 - protein, 11 aa, synthetic construct
  source 1..11: note = Description of Artificial Sequence: Synthetic peptide; note = XENP020130 vlCDR3
YYGNYGGYFDV

SEQ ID NO: 38493 - protein, 215 aa, synthetic construct; identical to SEQ ID NO: 4504
  source 1..215: note = Description of Artificial Sequence: Synthetic polypeptide; note = XENP020130 ipilimumab_H3_L0.22-1G6_L1.210_H1.288 Light Chain

SEQ ID NO: 38494 - protein, 108 aa, synthetic construct; identical to SEQ ID NO: 1607
  source 1..108: note = Description of Artificial Sequence: Synthetic polypeptide; note = VL of XENP020130

SEQ ID NO: 38495 - protein, 12 aa, synthetic construct
  source 1..12: note = Description of Artificial Sequence: Synthetic peptide; note = XENP020130 vlCDR1
RASQSVSSSYLA

SEQ ID NO: 38496 - protein, 7 aa, synthetic construct
  source 1..7: note = Description of Artificial Sequence: Synthetic peptide; note = XENP020130 vlCDR2
GAFSRAT

SEQ ID NO: 38497 - protein, 9 aa, synthetic construct
  source 1..9: note = Description of Artificial Sequence: Synthetic peptide; note = XENP020130 vlCDR3
QQYGSSPWT

SEQ ID NO: 38498 - protein, 447 aa, synthetic construct; identical to SEQ ID NO: 23356
  source 1..447: note = Description of Artificial Sequence: Synthetic polypeptide; note = XENP020146 ipilimumab_H3_L0.22-1G6_H1.280_L1.224 Fab-Fc Heavy Chain

SEQ ID NO: 38499 - protein, 118 aa, synthetic construct; identical to SEQ ID NO: 139
  source 1..118: note = Description of Artificial Sequence: Synthetic polypeptide; note = VH of XENP020146

SEQ ID NO: 38500 - protein, 5 aa, synthetic construct
  source 1..5: note = Description of Artificial Sequence: Synthetic peptide; note = XENP020146 vhCDR1
SYTMH

SEQ ID NO: 38501 - protein, 17 aa, synthetic construct
  source 1..17: note = Description of Artificial Sequence: Synthetic peptide; note = XENP020146 vhCDR2
FISYDGNNKYYADSVKG

SEQ ID NO: 38502 - protein, 9 aa, synthetic construct
  source 1..9: note = Description of Artificial Sequence: Synthetic peptide; note = XENP020146 vhCDR3
TGWLGPFDY

SEQ ID NO: 38503 - protein, 480 aa, synthetic construct; identical to SEQ ID NO: 22809
  source 1..480: note = Description of Artificial Sequence: Synthetic polypeptide; note = XENP020146 ipilimumab_H3_L0.22-1G6_H1.280_L1.224 scFv-Fc Heavy Chain

SEQ ID NO: 38504 - protein, 122 aa, synthetic construct; identical to SEQ ID NO: 10917
  source 1..122: note = Description of Artificial Sequence: Synthetic polypeptide; note = VH of XENP020146

SEQ ID NO: 38505 - protein, 107 aa, synthetic construct; identical to SEQ ID NO: 22811
  source 1..107: note = Description of Artificial Sequence: Synthetic polypeptide; note = VL of XENP020146

SEQ ID NO: 38506 - protein, 231 aa, synthetic construct; identical to SEQ ID NO: 21532
  source 1..231: note = Description of Artificial Sequence: Synthetic polypeptide; note = Fc chain of XENP020146

SEQ ID NO: 38507 - protein, 5 aa, synthetic construct
  source 1..5: note = Description of Artificial Sequence: Synthetic peptide; note = XENP020146 vhCDR1
NYWMN

SEQ ID NO: 38508 - protein, 19 aa, synthetic construct
  source 1..19: note = Description of Artificial Sequence: Synthetic peptide; note = XENP020146 vhCDR2
EIRLYSNNYATHYAESVKG

SEQ ID NO: 38509 - protein, 11 aa, synthetic construct
  source 1..11: note = Description of Artificial Sequence: Synthetic peptide; note = XENP020146 vhCDR3
YYGNYGGYFDV

SEQ ID NO: 38510 - protein, 11 aa, synthetic construct
  source 1..11: note = Description of Artificial Sequence: Synthetic peptide; note = XENP020146 vlCDR1
RASQSVGNDVA

SEQ ID NO: 38511 - protein, 7 aa, synthetic construct
  source 1..7: note = Description of Artificial Sequence: Synthetic peptide; note = XENP020146 vlCDR2
YASHRYT

SEQ ID NO: 38512 - protein, 9 aa, synthetic construct
  source 1..9: note = Description of Artificial Sequence: Synthetic peptide; note = XENP020146 vlCDR3
QQDWSSPRT

SEQ ID NO: 38513 - protein, 215 aa, synthetic construct; identical to SEQ ID NO: 4504
  source 1..215: note = Description of Artificial Sequence: Synthetic polypeptide; note = XENP020146 ipilimumab_H3_L0.22-1G6_H1.280_L1.224 Light Chain

SEQ ID NO: 38514 - protein, 108 aa, synthetic construct; identical to SEQ ID NO: 1607
  source 1..108: note = Description of Artificial Sequence: Synthetic polypeptide; note = VL of XENP020146

SEQ ID NO: 38515 - protein, 12 aa, synthetic construct
  source 1..12: note = Description of Artificial Sequence: Synthetic peptide; note = XENP020146 vlCDR1
RASQSVSSSYLA

SEQ ID NO: 38516 - protein, 7 aa, synthetic construct
  source 1..7: note = Description of Artificial Sequence: Synthetic peptide; note = XENP020146 vlCDR2
GAFSRAT

SEQ ID NO: 38517 - protein, 9 aa, synthetic construct
  source 1..9: note = Description of Artificial Sequence: Synthetic peptide; note = XENP020146 vlCDR3
QQYGSSPWT

SEQ ID NO: 38518 - protein, 447 aa, synthetic construct; identical to SEQ ID NO: 23556
  source 1..447: note = Description of Artificial Sequence: Synthetic polypeptide; note = XENP020717 ipilimumab_H3_L0.22-1G6_L1.194_H1.279 M428L/N434S  Fab-Fc Heavy Chain

SEQ ID NO: 38519 - protein, 118 aa, synthetic construct; identical to SEQ ID NO: 139
  source 1..118: note = Description of Artificial Sequence: Synthetic polypeptide; note = VH of XENP020717

SEQ ID NO: 38520 - protein, 5 aa, synthetic construct
  source 1..5: note = Description of Artificial Sequence: Synthetic peptide; note = XENP020717 vhCDR1
SYTMH

SEQ ID NO: 38521 - protein, 17 aa, synthetic construct
  source 1..17: note = Description of Artificial Sequence: Synthetic peptide; note = XENP020717 vhCDR2
FISYDGNNKYYADSVKG

SEQ ID NO: 38522 - protein, 9 aa, synthetic construct
  source 1..9: note = Description of Artificial Sequence: Synthetic peptide; note = XENP020717 vhCDR3
TGWLGPFDY

SEQ ID NO: 38523 - protein, 480 aa, synthetic construct; identical to SEQ ID NO: 23581
  source 1..480: note = Description of Artificial Sequence: Synthetic polypeptide; note = XENP020717 ipilimumab_H3_L0.22-1G6_L1.194_H1.279 M428L/N434S scFv-Fc Heavy Chain

SEQ ID NO: 38524 - protein, 107 aa, synthetic construct; identical to SEQ ID NO: 10999
  source 1..107: note = Description of Artificial Sequence: Synthetic polypeptide; note = VH of XENP020717

SEQ ID NO: 38525 - protein, 122 aa, synthetic construct; identical to SEQ ID NO: 10908
  source 1..122: note = Description of Artificial Sequence: Synthetic polypeptide; note = VL of XENP020717

SEQ ID NO: 38526 - protein, 231 aa, synthetic construct; identical to SEQ ID NO: 21572
  source 1..231: note = Description of Artificial Sequence: Synthetic polypeptide; note = Fc chain of XENP020717

SEQ ID NO: 38527 - protein, 11 aa, synthetic construct
  source 1..11: note = Description of Artificial Sequence: Synthetic peptide; note = XENP020717 vhCDR1
RASQSVGNDVA

SEQ ID NO: 38528 - protein, 7 aa, synthetic construct
  source 1..7: note = Description of Artificial Sequence: Synthetic peptide; note = XENP020717 vhCDR2
YASHRYT

SEQ ID NO: 38529 - protein, 9 aa, synthetic construct
  source 1..9: note = Description of Artificial Sequence: Synthetic peptide; note = XENP020717 vhCDR3
QQDFSSPRT

SEQ ID NO: 38530 - protein, 5 aa, synthetic construct
  source 1..5: note = Description of Artificial Sequence: Synthetic peptide; note = XENP020717 vlCDR1
NYWMN

SEQ ID NO: 38531 - protein, 19 aa, synthetic construct
  source 1..19: note = Description of Artificial Sequence: Synthetic peptide; note = XENP020717 vlCDR2
EIRLYSNNYATHYAESVKG

SEQ ID NO: 38532 - protein, 11 aa, synthetic construct
  source 1..11: note = Description of Artificial Sequence: Synthetic peptide; note = XENP020717 vlCDR3
YYGNYGGYFDV

SEQ ID NO: 38533 - protein, 215 aa, synthetic construct; identical to SEQ ID NO: 4504
  source 1..215: note = Description of Artificial Sequence: Synthetic polypeptide; note = XENP020717 ipilimumab_H3_L0.22-1G6_L1.194_H1.279 M428L/N434S Light Chain

SEQ ID NO: 38534 - protein, 108 aa, synthetic construct; identical to SEQ ID NO: 1607
  source 1..108: note = Description of Artificial Sequence: Synthetic polypeptide; note = VL of XENP020717

SEQ ID NO: 38535 - protein, 12 aa, synthetic construct
  source 1..12: note = Description of Artificial Sequence: Synthetic peptide; note = XENP020717 vlCDR1
RASQSVSSSYLA

SEQ ID NO: 38536 - protein, 7 aa, synthetic construct
  source 1..7: note = Description of Artificial Sequence: Synthetic peptide; note = XENP020717 vlCDR2
GAFSRAT

SEQ ID NO: 38537 - protein, 9 aa, synthetic construct
  source 1..9: note = Description of Artificial Sequence: Synthetic peptide; note = XENP020717 vlCDR3
QQYGSSPWT

SEQ ID NO: 38538 - protein, 449 aa, synthetic construct; identical to SEQ ID NO: 36247
  source 1..449: note = Description of Artificial Sequence: Synthetic polypeptide; note = XENP022836 2E9_H1L1_Fab-[CTLA-4]_H3.23_L0.129_scFv HC-Fab

SEQ ID NO: 38539 - protein, 120 aa, synthetic construct; identical to SEQ ID NO: 11412
  source 1..120: note = Description of Artificial Sequence: Synthetic polypeptide; note = VH of XENP022836

SEQ ID NO: 38540 - protein, 5 aa, synthetic construct
  source 1..5: note = Description of Artificial Sequence: Synthetic peptide; note = XENP022836 vhCDR1
NYWLG

SEQ ID NO: 38541 - protein, 17 aa, synthetic construct
  source 1..17: note = Description of Artificial Sequence: Synthetic peptide; note = XENP022836 vhCDR2
NFYPGSSNTYYNEKFQG

SEQ ID NO: 38542 - protein, 11 aa, synthetic construct
  source 1..11: note = Description of Artificial Sequence: Synthetic peptide; note = XENP022836 vhCDR3
HYGTNYRYFDV

SEQ ID NO: 38543 - protein, 477 aa, synthetic construct; identical to SEQ ID NO: 21669
  source 1..477: note = Description of Artificial Sequence: Synthetic polypeptide; note = XENP022836 2E9_H1L1_Fab-[CTLA-4]_H3.23_L0.129_scFv HC-scFV

SEQ ID NO: 38544 - protein, 118 aa, synthetic construct; identical to SEQ ID NO: 2632
  source 1..118: note = Description of Artificial Sequence: Synthetic polypeptide; note = VH of XENP022836

SEQ ID NO: 38545 - protein, 108 aa, synthetic construct; identical to SEQ ID NO: 2768
  source 1..108: note = Description of Artificial Sequence: Synthetic polypeptide; note = VL of XENP022836

SEQ ID NO: 38546 - protein, 231 aa, synthetic construct; identical to SEQ ID NO: 21532
  source 1..231: note = Description of Artificial Sequence: Synthetic polypeptide; note = Fc chain of XENP022836

SEQ ID NO: 38547 - protein, 5 aa, synthetic construct
  source 1..5: note = Description of Artificial Sequence: Synthetic peptide; note = XENP022836 vhCDR1
SYTMH

SEQ ID NO: 38548 - protein, 17 aa, synthetic construct
  source 1..17: note = Description of Artificial Sequence: Synthetic peptide; note = XENP022836 vhCDR2
FISYDGNYKYYADSVKG

SEQ ID NO: 38549 - protein, 9 aa, synthetic construct
  source 1..9: note = Description of Artificial Sequence: Synthetic peptide; note = XENP022836 vhCDR3
GGHLGPFDL

SEQ ID NO: 38550 - protein, 12 aa, synthetic construct
  source 1..12: note = Description of Artificial Sequence: Synthetic peptide; note = XENP022836 vlCDR1
RASQSVGSSYLA

SEQ ID NO: 38551 - protein, 7 aa, synthetic construct
  source 1..7: note = Description of Artificial Sequence: Synthetic peptide; note = XENP022836 vlCDR2
GASSRAT

SEQ ID NO: 38552 - protein, 9 aa, synthetic construct
  source 1..9: note = Description of Artificial Sequence: Synthetic peptide; note = XENP022836 vlCDR3
QQYGSSPWT

SEQ ID NO: 38553 - protein, 214 aa, synthetic construct; identical to SEQ ID NO: 17080
  source 1..214: note = Description of Artificial Sequence: Synthetic polypeptide; note = XENP022836 2E9_H1L1_Fab-[CTLA-4]_H3.23_L0.129_scFv Light Chain

SEQ ID NO: 38554 - protein, 107 aa, synthetic construct; identical to SEQ ID NO: 11413
  source 1..107: note = Description of Artificial Sequence: Synthetic polypeptide; note = VL of XENP022836

SEQ ID NO: 38555 - protein, 11 aa, synthetic construct
  source 1..11: note = Description of Artificial Sequence: Synthetic peptide; note = XENP022836 vlCDR1
RASQSVSNDVA

SEQ ID NO: 38556 - protein, 7 aa, synthetic construct
  source 1..7: note = Description of Artificial Sequence: Synthetic peptide; note = XENP022836 vlCDR2
YASNRYT

SEQ ID NO: 38557 - protein, 9 aa, synthetic construct
  source 1..9: note = Description of Artificial Sequence: Synthetic peptide; note = XENP022836 vlCDR3
QQDYSSPYT

SEQ ID NO: 38558 - protein, 447 aa, synthetic construct; identical to SEQ ID NO: 17235
  source 1..447: note = Description of Artificial Sequence: Synthetic polypeptide; note = XENP020206 2A11_H1L2-1G6_L1.194_H1.279 Fab-Fc Heavy Chain

SEQ ID NO: 38559 - protein, 118 aa, synthetic construct; identical to SEQ ID NO: 17236
  source 1..118: note = Description of Artificial Sequence: Synthetic polypeptide; note = VH of XENP020206

SEQ ID NO: 38560 - protein, 5 aa, synthetic construct
  source 1..5: note = Description of Artificial Sequence: Synthetic peptide; note = XENP020206 vhCDR1
DYYMH

SEQ ID NO: 38561 - protein, 17 aa, synthetic construct
  source 1..17: note = Description of Artificial Sequence: Synthetic peptide; note = XENP020206 vhCDR2
WIDPENGDTEYAPKFQG

SEQ ID NO: 38562 - protein, 9 aa, synthetic construct
  source 1..9: note = Description of Artificial Sequence: Synthetic peptide; note = XENP020206 vhCDR3
RGVRQALDY

SEQ ID NO: 38563 - protein, 480 aa, synthetic construct; identical to SEQ ID NO: 23221
  source 1..480: note = Description of Artificial Sequence: Synthetic polypeptide; note = XENP020206 2A11_H1L2-1G6_L1.194_H1.279 scFv-Fc Heavy Chain

SEQ ID NO: 38564 - protein, 107 aa, synthetic construct; identical to SEQ ID NO: 10999
  source 1..107: note = Description of Artificial Sequence: Synthetic polypeptide; note = VH of XENP020206

SEQ ID NO: 38565 - protein, 122 aa, synthetic construct; identical to SEQ ID NO: 10908
  source 1..122: note = Description of Artificial Sequence: Synthetic polypeptide; note = VL of XENP020206

SEQ ID NO: 38566 - protein, 231 aa, synthetic construct; identical to SEQ ID NO: 21532
  source 1..231: note = Description of Artificial Sequence: Synthetic polypeptide; note = Fc chain of XENP020206

SEQ ID NO: 38567 - protein, 11 aa, synthetic construct
  source 1..11: note = Description of Artificial Sequence: Synthetic peptide; note = XENP020206 vhCDR1
RASQSVGNDVA

SEQ ID NO: 38568 - protein, 7 aa, synthetic construct
  source 1..7: note = Description of Artificial Sequence: Synthetic peptide; note = XENP020206 vhCDR2
YASHRYT

SEQ ID NO: 38569 - protein, 9 aa, synthetic construct
  source 1..9: note = Description of Artificial Sequence: Synthetic peptide; note = XENP020206 vhCDR3
QQDFSSPRT

SEQ ID NO: 38570 - protein, 5 aa, synthetic construct
  source 1..5: note = Description of Artificial Sequence: Synthetic peptide; note = XENP020206 vlCDR1
NYWMN

SEQ ID NO: 38571 - protein, 19 aa, synthetic construct
  source 1..19: note = Description of Artificial Sequence: Synthetic peptide; note = XENP020206 vlCDR2
EIRLYSNNYATHYAESVKG

SEQ ID NO: 38572 - protein, 11 aa, synthetic construct
  source 1..11: note = Description of Artificial Sequence: Synthetic peptide; note = XENP020206 vlCDR3
YYGNYGGYFDV

SEQ ID NO: 38573 - protein, 214 aa, synthetic construct; identical to SEQ ID NO: 17250
  source 1..214: note = Description of Artificial Sequence: Synthetic polypeptide; note = XENP020206 2A11_H1L2-1G6_L1.194_H1.279 Light Chain

SEQ ID NO: 38574 - protein, 107 aa, synthetic construct; identical to SEQ ID NO: 17251
  source 1..107: note = Description of Artificial Sequence: Synthetic polypeptide; note = VL of XENP020206

SEQ ID NO: 38575 - protein, 11 aa, synthetic construct
  source 1..11: note = Description of Artificial Sequence: Synthetic peptide; note = XENP020206 vlCDR1
QASQDIGNYLN

SEQ ID NO: 38576 - protein, 7 aa, synthetic construct
  source 1..7: note = Description of Artificial Sequence: Synthetic peptide; note = XENP020206 vlCDR2
YTSRLHS

SEQ ID NO: 38577 - protein, 9 aa, synthetic construct
  source 1..9: note = Description of Artificial Sequence: Synthetic peptide; note = XENP020206 vlCDR3
QQGNTLPYT

SEQ ID NO: 38578 - protein, 447 aa, synthetic construct; identical to SEQ ID NO: 17235
  source 1..447: note = Description of Artificial Sequence: Synthetic polypeptide; note = XENP021582 2A11_H1_L2.91_Fab-1G6_L1.194_H1.279 Fab-Fc Heavy Chain

SEQ ID NO: 38579 - protein, 118 aa, synthetic construct; identical to SEQ ID NO: 17236
  source 1..118: note = Description of Artificial Sequence: Synthetic polypeptide; note = VH of XENP021582

SEQ ID NO: 38580 - protein, 5 aa, synthetic construct
  source 1..5: note = Description of Artificial Sequence: Synthetic peptide; note = XENP021582 vhCDR1
DYYMH

SEQ ID NO: 38581 - protein, 17 aa, synthetic construct
  source 1..17: note = Description of Artificial Sequence: Synthetic peptide; note = XENP021582 vhCDR2
WIDPENGDTEYAPKFQG

SEQ ID NO: 38582 - protein, 9 aa, synthetic construct
  source 1..9: note = Description of Artificial Sequence: Synthetic peptide; note = XENP021582 vhCDR3
RGVRQALDY

SEQ ID NO: 38583 - protein, 480 aa, synthetic construct; identical to SEQ ID NO: 23221
  source 1..480: note = Description of Artificial Sequence: Synthetic polypeptide; note = XENP021582 2A11_H1_L2.91_Fab-1G6_L1.194_H1.279 scFv-Fc Heavy Chain

SEQ ID NO: 38584 - protein, 107 aa, synthetic construct; identical to SEQ ID NO: 10999
  source 1..107: note = Description of Artificial Sequence: Synthetic polypeptide; note = VH of XENP021582

SEQ ID NO: 38585 - protein, 122 aa, synthetic construct; identical to SEQ ID NO: 10908
  source 1..122: note = Description of Artificial Sequence: Synthetic polypeptide; note = VL of XENP021582

SEQ ID NO: 38586 - protein, 231 aa, synthetic construct; identical to SEQ ID NO: 21532
  source 1..231: note = Description of Artificial Sequence: Synthetic polypeptide; note = Fc chain of XENP021582

SEQ ID NO: 38587 - protein, 11 aa, synthetic construct
  source 1..11: note = Description of Artificial Sequence: Synthetic peptide; note = XENP021582 vhCDR1
RASQSVGNDVA

SEQ ID NO: 38588 - protein, 7 aa, synthetic construct
  source 1..7: note = Description of Artificial Sequence: Synthetic peptide; note = XENP021582 vhCDR2
YASHRYT

SEQ ID NO: 38589 - protein, 9 aa, synthetic construct
  source 1..9: note = Description of Artificial Sequence: Synthetic peptide; note = XENP021582 vhCDR3
QQDFSSPRT

SEQ ID NO: 38590 - protein, 5 aa, synthetic construct
  source 1..5: note = Description of Artificial Sequence: Synthetic peptide; note = XENP021582 vlCDR1
NYWMN

SEQ ID NO: 38591 - protein, 19 aa, synthetic construct
  source 1..19: note = Description of Artificial Sequence: Synthetic peptide; note = XENP021582 vlCDR2
EIRLYSNNYATHYAESVKG

SEQ ID NO: 38592 - protein, 11 aa, synthetic construct
  source 1..11: note = Description of Artificial Sequence: Synthetic peptide; note = XENP021582 vlCDR3
YYGNYGGYFDV

SEQ ID NO: 38593 - protein, 214 aa, synthetic construct; identical to SEQ ID NO: 24470
  source 1..214: note = Description of Artificial Sequence: Synthetic polypeptide; note = XENP021582 2A11_H1_L2.91_Fab-1G6_L1.194_H1.279 Light Chain

SEQ ID NO: 38594 - protein, 107 aa, synthetic construct; identical to SEQ ID NO: 24471
  source 1..107: note = Description of Artificial Sequence: Synthetic polypeptide; note = VL of XENP021582

SEQ ID NO: 38595 - protein, 11 aa, synthetic construct
  source 1..11: note = Description of Artificial Sequence: Synthetic peptide; note = XENP021582 vlCDR1
QASQDIGNYLN

SEQ ID NO: 38596 - protein, 7 aa, synthetic construct
  source 1..7: note = Description of Artificial Sequence: Synthetic peptide; note = XENP021582 vlCDR2
YTSRLHS

SEQ ID NO: 38597 - protein, 9 aa, synthetic construct
  source 1..9: note = Description of Artificial Sequence: Synthetic peptide; note = XENP021582 vlCDR3
QQGNTLPYT

SEQ ID NO: 38598 - protein, 447 aa, synthetic construct; identical to SEQ ID NO: 17235
  source 1..447: note = Description of Artificial Sequence: Synthetic polypeptide; note = XENP021584 2A11_H1_L2.93_Fab-1G6_L1.194_H1.279 Fab-Fc Heavy Chain

SEQ ID NO: 38599 - protein, 118 aa, synthetic construct; identical to SEQ ID NO: 17236
  source 1..118: note = Description of Artificial Sequence: Synthetic polypeptide; note = VH of XENP021584

SEQ ID NO: 38600 - protein, 5 aa, synthetic construct
  source 1..5: note = Description of Artificial Sequence: Synthetic peptide; note = XENP021584 vhCDR1
DYYMH

SEQ ID NO: 38601 - protein, 17 aa, synthetic construct
  source 1..17: note = Description of Artificial Sequence: Synthetic peptide; note = XENP021584 vhCDR2
WIDPENGDTEYAPKFQG

SEQ ID NO: 38602 - protein, 9 aa, synthetic construct
  source 1..9: note = Description of Artificial Sequence: Synthetic peptide; note = XENP021584 vhCDR3
RGVRQALDY

SEQ ID NO: 38603 - protein, 480 aa, synthetic construct; identical to SEQ ID NO: 23221
  source 1..480: note = Description of Artificial Sequence: Synthetic polypeptide; note = XENP021584 2A11_H1_L2.93_Fab-1G6_L1.194_H1.279 scFv-Fc Heavy Chain

SEQ ID NO: 38604 - protein, 107 aa, synthetic construct; identical to SEQ ID NO: 10999
  source 1..107: note = Description of Artificial Sequence: Synthetic polypeptide; note = VH of XENP021584

SEQ ID NO: 38605 - protein, 122 aa, synthetic construct; identical to SEQ ID NO: 10908
  source 1..122: note = Description of Artificial Sequence: Synthetic polypeptide; note = VL of XENP021584

SEQ ID NO: 38606 - protein, 231 aa, synthetic construct; identical to SEQ ID NO: 21532
  source 1..231: note = Description of Artificial Sequence: Synthetic polypeptide; note = Fc chain of XENP021584

SEQ ID NO: 38607 - protein, 11 aa, synthetic construct
  source 1..11: note = Description of Artificial Sequence: Synthetic peptide; note = XENP021584 vhCDR1
RASQSVGNDVA

SEQ ID NO: 38608 - protein, 7 aa, synthetic construct
  source 1..7: note = Description of Artificial Sequence: Synthetic peptide; note = XENP021584 vhCDR2
YASHRYT

SEQ ID NO: 38609 - protein, 9 aa, synthetic construct
  source 1..9: note = Description of Artificial Sequence: Synthetic peptide; note = XENP021584 vhCDR3
QQDFSSPRT

SEQ ID NO: 38610 - protein, 5 aa, synthetic construct
  source 1..5: note = Description of Artificial Sequence: Synthetic peptide; note = XENP021584 vlCDR1
NYWMN

SEQ ID NO: 38611 - protein, 19 aa, synthetic construct
  source 1..19: note = Description of Artificial Sequence: Synthetic peptide; note = XENP021584 vlCDR2
EIRLYSNNYATHYAESVKG

SEQ ID NO: 38612 - protein, 11 aa, synthetic construct
  source 1..11: note = Description of Artificial Sequence: Synthetic peptide; note = XENP021584 vlCDR3
YYGNYGGYFDV

SEQ ID NO: 38613 - protein, 214 aa, synthetic construct; identical to SEQ ID NO: 24510
  source 1..214: note = Description of Artificial Sequence: Synthetic polypeptide; note = XENP021584 2A11_H1_L2.93_Fab-1G6_L1.194_H1.279 Light Chain

SEQ ID NO: 38614 - protein, 107 aa, synthetic construct; identical to SEQ ID NO: 24511
  source 1..107: note = Description of Artificial Sequence: Synthetic polypeptide; note = VL of XENP021584

SEQ ID NO: 38615 - protein, 11 aa, synthetic construct
  source 1..11: note = Description of Artificial Sequence: Synthetic peptide; note = XENP021584 vlCDR1
QASQDIGNYLN

SEQ ID NO: 38616 - protein, 7 aa, synthetic construct
  source 1..7: note = Description of Artificial Sequence: Synthetic peptide; note = XENP021584 vlCDR2
YTSRLHS

SEQ ID NO: 38617 - protein, 9 aa, synthetic construct
  source 1..9: note = Description of Artificial Sequence: Synthetic peptide; note = XENP021584 vlCDR3
QQGNTLPYT

SEQ ID NO: 38618 - protein, 447 aa, synthetic construct; identical to SEQ ID NO: 17235
  source 1..447: note = Description of Artificial Sequence: Synthetic polypeptide; note = XENP021588 2A11_H1_L2.97_Fab-1G6_L1.194_H1.279 Fab-Fc Heavy Chain

SEQ ID NO: 38619 - protein, 118 aa, synthetic construct; identical to SEQ ID NO: 17236
  source 1..118: note = Description of Artificial Sequence: Synthetic polypeptide; note = VH of XENP021588

SEQ ID NO: 38620 - protein, 5 aa, synthetic construct
  source 1..5: note = Description of Artificial Sequence: Synthetic peptide; note = XENP021588 vhCDR1
DYYMH

SEQ ID NO: 38621 - protein, 17 aa, synthetic construct
  source 1..17: note = Description of Artificial Sequence: Synthetic peptide; note = XENP021588 vhCDR2
WIDPENGDTEYAPKFQG

SEQ ID NO: 38622 - protein, 9 aa, synthetic construct
  source 1..9: note = Description of Artificial Sequence: Synthetic peptide; note = XENP021588 vhCDR3
RGVRQALDY

SEQ ID NO: 38623 - protein, 480 aa, synthetic construct; identical to SEQ ID NO: 23221
  source 1..480: note = Description of Artificial Sequence: Synthetic polypeptide; note = XENP021588 2A11_H1_L2.97_Fab-1G6_L1.194_H1.279 scFv-Fc Heavy Chain

SEQ ID NO: 38624 - protein, 107 aa, synthetic construct; identical to SEQ ID NO: 10999
  source 1..107: note = Description of Artificial Sequence: Synthetic polypeptide; note = VH of XENP021588

SEQ ID NO: 38625 - protein, 122 aa, synthetic construct; identical to SEQ ID NO: 10908
  source 1..122: note = Description of Artificial Sequence: Synthetic polypeptide; note = VL of XENP021588

SEQ ID NO: 38626 - protein, 231 aa, synthetic construct; identical to SEQ ID NO: 21532
  source 1..231: note = Description of Artificial Sequence: Synthetic polypeptide; note = Fc chain of XENP021588

SEQ ID NO: 38627 - protein, 11 aa, synthetic construct
  source 1..11: note = Description of Artificial Sequence: Synthetic peptide; note = XENP021588 vhCDR1
RASQSVGNDVA

SEQ ID NO: 38628 - protein, 7 aa, synthetic construct
  source 1..7: note = Description of Artificial Sequence: Synthetic peptide; note = XENP021588 vhCDR2
YASHRYT

SEQ ID NO: 38629 - protein, 9 aa, synthetic construct
  source 1..9: note = Description of Artificial Sequence: Synthetic peptide; note = XENP021588 vhCDR3
QQDFSSPRT

SEQ ID NO: 38630 - protein, 5 aa, synthetic construct
  source 1..5: note = Description of Artificial Sequence: Synthetic peptide; note = XENP021588 vlCDR1
NYWMN

SEQ ID NO: 38631 - protein, 19 aa, synthetic construct
  source 1..19: note = Description of Artificial Sequence: Synthetic peptide; note = XENP021588 vlCDR2
EIRLYSNNYATHYAESVKG

SEQ ID NO: 38632 - protein, 11 aa, synthetic construct
  source 1..11: note = Description of Artificial Sequence: Synthetic peptide; note = XENP021588 vlCDR3
YYGNYGGYFDV

SEQ ID NO: 38633 - protein, 214 aa, synthetic construct; identical to SEQ ID NO: 24590
  source 1..214: note = Description of Artificial Sequence: Synthetic polypeptide; note = XENP021588 2A11_H1_L2.97_Fab-1G6_L1.194_H1.279 Light Chain

SEQ ID NO: 38634 - protein, 107 aa, synthetic construct; identical to SEQ ID NO: 24591
  source 1..107: note = Description of Artificial Sequence: Synthetic polypeptide; note = VL of XENP021588

SEQ ID NO: 38635 - protein, 11 aa, synthetic construct
  source 1..11: note = Description of Artificial Sequence: Synthetic peptide; note = XENP021588 vlCDR1
QASQDIGNYLN

SEQ ID NO: 38636 - protein, 7 aa, synthetic construct
  source 1..7: note = Description of Artificial Sequence: Synthetic peptide; note = XENP021588 vlCDR2
YTSRLHS

SEQ ID NO: 38637 - protein, 9 aa, synthetic construct
  source 1..9: note = Description of Artificial Sequence: Synthetic peptide; note = XENP021588 vlCDR3
QQGNTLPYT

SEQ ID NO: 38638 - protein, 447 aa, synthetic construct; identical to SEQ ID NO: 17235
  source 1..447: note = Description of Artificial Sequence: Synthetic polypeptide; note = XENP022123 2A11_H1_L2.122_Fab-1G6_L1.194_H1.279 Fab-Fc Heavy Chain

SEQ ID NO: 38639 - protein, 118 aa, synthetic construct; identical to SEQ ID NO: 17236
  source 1..118: note = Description of Artificial Sequence: Synthetic polypeptide; note = VH of XENP022123

SEQ ID NO: 38640 - protein, 5 aa, synthetic construct
  source 1..5: note = Description of Artificial Sequence: Synthetic peptide; note = XENP022123 vhCDR1
DYYMH

SEQ ID NO: 38641 - protein, 17 aa, synthetic construct
  source 1..17: note = Description of Artificial Sequence: Synthetic peptide; note = XENP022123 vhCDR2
WIDPENGDTEYAPKFQG

SEQ ID NO: 38642 - protein, 9 aa, synthetic construct
  source 1..9: note = Description of Artificial Sequence: Synthetic peptide; note = XENP022123 vhCDR3
RGVRQALDY

SEQ ID NO: 38643 - protein, 480 aa, synthetic construct; identical to SEQ ID NO: 23221
  source 1..480: note = Description of Artificial Sequence: Synthetic polypeptide; note = XENP022123 2A11_H1_L2.122_Fab-1G6_L1.194_H1.279 scFv-Fc Heavy Chain

SEQ ID NO: 38644 - protein, 107 aa, synthetic construct; identical to SEQ ID NO: 10999
  source 1..107: note = Description of Artificial Sequence: Synthetic polypeptide; note = VH of XENP022123

SEQ ID NO: 38645 - protein, 122 aa, synthetic construct; identical to SEQ ID NO: 10908
  source 1..122: note = Description of Artificial Sequence: Synthetic polypeptide; note = VL of XENP022123

SEQ ID NO: 38646 - protein, 231 aa, synthetic construct; identical to SEQ ID NO: 21532
  source 1..231: note = Description of Artificial Sequence: Synthetic polypeptide; note = Fc chain of XENP022123

SEQ ID NO: 38647 - protein, 11 aa, synthetic construct
  source 1..11: note = Description of Artificial Sequence: Synthetic peptide; note = XENP022123 vhCDR1
RASQSVGNDVA

SEQ ID NO: 38648 - protein, 7 aa, synthetic construct
  source 1..7: note = Description of Artificial Sequence: Synthetic peptide; note = XENP022123 vhCDR2
YASHRYT

SEQ ID NO: 38649 - protein, 9 aa, synthetic construct
  source 1..9: note = Description of Artificial Sequence: Synthetic peptide; note = XENP022123 vhCDR3
QQDFSSPRT

SEQ ID NO: 38650 - protein, 5 aa, synthetic construct
  source 1..5: note = Description of Artificial Sequence: Synthetic peptide; note = XENP022123 vlCDR1
NYWMN

SEQ ID NO: 38651 - protein, 19 aa, synthetic construct
  source 1..19: note = Description of Artificial Sequence: Synthetic peptide; note = XENP022123 vlCDR2
EIRLYSNNYATHYAESVKG

SEQ ID NO: 38652 - protein, 11 aa, synthetic construct
  source 1..11: note = Description of Artificial Sequence: Synthetic peptide; note = XENP022123 vlCDR3
YYGNYGGYFDV

SEQ ID NO: 38653 - protein, 214 aa, synthetic construct; identical to SEQ ID NO: 24690
  source 1..214: note = Description of Artificial Sequence: Synthetic polypeptide; note = XENP022123 2A11_H1_L2.122_Fab-1G6_L1.194_H1.279 Light Chain

SEQ ID NO: 38654 - protein, 107 aa, synthetic construct; identical to SEQ ID NO: 24691
  source 1..107: note = Description of Artificial Sequence: Synthetic polypeptide; note = VL of XENP022123

SEQ ID NO: 38655 - protein, 11 aa, synthetic construct
  source 1..11: note = Description of Artificial Sequence: Synthetic peptide; note = XENP022123 vlCDR1
QASQDIGNYLN

SEQ ID NO: 38656 - protein, 7 aa, synthetic construct
  source 1..7: note = Description of Artificial Sequence: Synthetic peptide; note = XENP022123 vlCDR2
YTSRLHS

SEQ ID NO: 38657 - protein, 9 aa, synthetic construct
  source 1..9: note = Description of Artificial Sequence: Synthetic peptide; note = XENP022123 vlCDR3
QQGNTLPYT

SEQ ID NO: 38658 - protein, 447 aa, synthetic construct; identical to SEQ ID NO: 17235
  source 1..447: note = Description of Artificial Sequence: Synthetic polypeptide; note = XENP022124 2A11_H1_L2.123_Fab-1G6_L1.194_H1.279 Fab-Fc Heavy Chain

SEQ ID NO: 38659 - protein, 118 aa, synthetic construct; identical to SEQ ID NO: 17236
  source 1..118: note = Description of Artificial Sequence: Synthetic polypeptide; note = VH of XENP022124

SEQ ID NO: 38660 - protein, 5 aa, synthetic construct
  source 1..5: note = Description of Artificial Sequence: Synthetic peptide; note = XENP022124 vhCDR1
DYYMH

SEQ ID NO: 38661 - protein, 17 aa, synthetic construct
  source 1..17: note = Description of Artificial Sequence: Synthetic peptide; note = XENP022124 vhCDR2
WIDPENGDTEYAPKFQG

SEQ ID NO: 38662 - protein, 9 aa, synthetic construct
  source 1..9: note = Description of Artificial Sequence: Synthetic peptide; note = XENP022124 vhCDR3
RGVRQALDY

SEQ ID NO: 38663 - protein, 480 aa, synthetic construct; identical to SEQ ID NO: 23221
  source 1..480: note = Description of Artificial Sequence: Synthetic polypeptide; note = XENP022124 2A11_H1_L2.123_Fab-1G6_L1.194_H1.279 scFv-Fc Heavy Chain

SEQ ID NO: 38664 - protein, 107 aa, synthetic construct; identical to SEQ ID NO: 10999
  source 1..107: note = Description of Artificial Sequence: Synthetic polypeptide; note = VH of XENP022124

SEQ ID NO: 38665 - protein, 122 aa, synthetic construct; identical to SEQ ID NO: 10908
  source 1..122: note = Description of Artificial Sequence: Synthetic polypeptide; note = VL of XENP022124

SEQ ID NO: 38666 - protein, 231 aa, synthetic construct; identical to SEQ ID NO: 21532
  source 1..231: note = Description of Artificial Sequence: Synthetic polypeptide; note = Fc chain of XENP022124

SEQ ID NO: 38667 - protein, 11 aa, synthetic construct
  source 1..11: note = Description of Artificial Sequence: Synthetic peptide; note = XENP022124 vhCDR1
RASQSVGNDVA

SEQ ID NO: 38668 - protein, 7 aa, synthetic construct
  source 1..7: note = Description of Artificial Sequence: Synthetic peptide; note = XENP022124 vhCDR2
YASHRYT

SEQ ID NO: 38669 - protein, 9 aa, synthetic construct
  source 1..9: note = Description of Artificial Sequence: Synthetic peptide; note = XENP022124 vhCDR3
QQDFSSPRT

SEQ ID NO: 38670 - protein, 5 aa, synthetic construct
  source 1..5: note = Description of Artificial Sequence: Synthetic peptide; note = XENP022124 vlCDR1
NYWMN

SEQ ID NO: 38671 - protein, 19 aa, synthetic construct
  source 1..19: note = Description of Artificial Sequence: Synthetic peptide; note = XENP022124 vlCDR2
EIRLYSNNYATHYAESVKG

SEQ ID NO: 38672 - protein, 11 aa, synthetic construct
  source 1..11: note = Description of Artificial Sequence: Synthetic peptide; note = XENP022124 vlCDR3
YYGNYGGYFDV

SEQ ID NO: 38673 - protein, 214 aa, synthetic construct; identical to SEQ ID NO: 24710
  source 1..214: note = Description of Artificial Sequence: Synthetic polypeptide; note = XENP022124 2A11_H1_L2.123_Fab-1G6_L1.194_H1.279 Light Chain

SEQ ID NO: 38674 - protein, 107 aa, synthetic construct; identical to SEQ ID NO: 24711
  source 1..107: note = Description of Artificial Sequence: Synthetic polypeptide; note = VL of XENP022124

SEQ ID NO: 38675 - protein, 11 aa, synthetic construct
  source 1..11: note = Description of Artificial Sequence: Synthetic peptide; note = XENP022124 vlCDR1
QASQDIGNYLN

SEQ ID NO: 38676 - protein, 7 aa, synthetic construct
  source 1..7: note = Description of Artificial Sequence: Synthetic peptide; note = XENP022124 vlCDR2
YTSRLHS

SEQ ID NO: 38677 - protein, 9 aa, synthetic construct
  source 1..9: note = Description of Artificial Sequence: Synthetic peptide; note = XENP022124 vlCDR3
QQGNTLPYT

SEQ ID NO: 38678 - protein, 447 aa, synthetic construct; identical to SEQ ID NO: 17235
  source 1..447: note = Description of Artificial Sequence: Synthetic polypeptide; note = XENP022125 2A11_H1_L2.124_Fab-1G6_L1.194_H1.279 Fab-Fc Heavy Chain

SEQ ID NO: 38679 - protein, 118 aa, synthetic construct; identical to SEQ ID NO: 17236
  source 1..118: note = Description of Artificial Sequence: Synthetic polypeptide; note = VH of XENP022125

SEQ ID NO: 38680 - protein, 5 aa, synthetic construct
  source 1..5: note = Description of Artificial Sequence: Synthetic peptide; note = XENP022125 vhCDR1
DYYMH

SEQ ID NO: 38681 - protein, 17 aa, synthetic construct
  source 1..17: note = Description of Artificial Sequence: Synthetic peptide; note = XENP022125 vhCDR2
WIDPENGDTEYAPKFQG

SEQ ID NO: 38682 - protein, 9 aa, synthetic construct
  source 1..9: note = Description of Artificial Sequence: Synthetic peptide; note = XENP022125 vhCDR3
RGVRQALDY

SEQ ID NO: 38683 - protein, 480 aa, synthetic construct; identical to SEQ ID NO: 23221
  source 1..480: note = Description of Artificial Sequence: Synthetic polypeptide; note = XENP022125 2A11_H1_L2.124_Fab-1G6_L1.194_H1.279 scFv-Fc Heavy Chain

SEQ ID NO: 38684 - protein, 107 aa, synthetic construct; identical to SEQ ID NO: 10999
  source 1..107: note = Description of Artificial Sequence: Synthetic polypeptide; note = VH of XENP022125

SEQ ID NO: 38685 - protein, 122 aa, synthetic construct; identical to SEQ ID NO: 10908
  source 1..122: note = Description of Artificial Sequence: Synthetic polypeptide; note = VL of XENP022125

SEQ ID NO: 38686 - protein, 231 aa, synthetic construct; identical to SEQ ID NO: 21532
  source 1..231: note = Description of Artificial Sequence: Synthetic polypeptide; note = Fc chain of XENP022125

SEQ ID NO: 38687 - protein, 11 aa, synthetic construct
  source 1..11: note = Description of Artificial Sequence: Synthetic peptide; note = XENP022125 vhCDR1
RASQSVGNDVA

SEQ ID NO: 38688 - protein, 7 aa, synthetic construct
  source 1..7: note = Description of Artificial Sequence: Synthetic peptide; note = XENP022125 vhCDR2
YASHRYT

SEQ ID NO: 38689 - protein, 9 aa, synthetic construct
  source 1..9: note = Description of Artificial Sequence: Synthetic peptide; note = XENP022125 vhCDR3
QQDFSSPRT

SEQ ID NO: 38690 - protein, 5 aa, synthetic construct
  source 1..5: note = Description of Artificial Sequence: Synthetic peptide; note = XENP022125 vlCDR1
NYWMN

SEQ ID NO: 38691 - protein, 19 aa, synthetic construct
  source 1..19: note = Description of Artificial Sequence: Synthetic peptide; note = XENP022125 vlCDR2
EIRLYSNNYATHYAESVKG

SEQ ID NO: 38692 - protein, 11 aa, synthetic construct
  source 1..11: note = Description of Artificial Sequence: Synthetic peptide; note = XENP022125 vlCDR3
YYGNYGGYFDV

SEQ ID NO: 38693 - protein, 214 aa, synthetic construct; identical to SEQ ID NO: 24730
  source 1..214: note = Description of Artificial Sequence: Synthetic polypeptide; note = XENP022125 2A11_H1_L2.124_Fab-1G6_L1.194_H1.279 Light Chain

SEQ ID NO: 38694 - protein, 107 aa, synthetic construct; identical to SEQ ID NO: 24731
  source 1..107: note = Description of Artificial Sequence: Synthetic polypeptide; note = VL of XENP022125

SEQ ID NO: 38695 - protein, 11 aa, synthetic construct
  source 1..11: note = Description of Artificial Sequence: Synthetic peptide; note = XENP022125 vlCDR1
QASQDIGNYLN

SEQ ID NO: 38696 - protein, 7 aa, synthetic construct
  source 1..7: note = Description of Artificial Sequence: Synthetic peptide; note = XENP022125 vlCDR2
YTSRLHS

SEQ ID NO: 38697 - protein, 9 aa, synthetic construct
  source 1..9: note = Description of Artificial Sequence: Synthetic peptide; note = XENP022125 vlCDR3
QQGNTLPYT

SEQ ID NO: 38698 - protein, 450 aa, synthetic construct; identical to SEQ ID NO: 22484
  source 1..450: note = Description of Artificial Sequence: Synthetic polypeptide; note = XENP022604 7G8_H3.30_L1.34-1G6_L1.194_H1.279 Fab-Fc Heavy Chain

SEQ ID NO: 38699 - protein, 121 aa, synthetic construct; identical to SEQ ID NO: 22485
  source 1..121: note = Description of Artificial Sequence: Synthetic polypeptide; note = VH of XENP022604

SEQ ID NO: 38700 - protein, 5 aa, synthetic construct
  source 1..5: note = Description of Artificial Sequence: Synthetic peptide; note = XENP022604 vhCDR1
DAWMS

SEQ ID NO: 38701 - protein, 19 aa, synthetic construct
  source 1..19: note = Description of Artificial Sequence: Synthetic peptide; note = XENP022604 vhCDR2
EISTKANNHATYYAESVKG

SEQ ID NO: 38702 - protein, 10 aa, synthetic construct
  source 1..10: note = Description of Artificial Sequence: Synthetic peptide; note = XENP022604 vhCDR3
LATWDWYFDV

SEQ ID NO: 38703 - protein, 480 aa, synthetic construct; identical to SEQ ID NO: 23221
  source 1..480: note = Description of Artificial Sequence: Synthetic polypeptide; note = XENP022604 7G8_H3.30_L1.34-1G6_L1.194_H1.279 scFv-Fc Heavy Chain

SEQ ID NO: 38704 - protein, 107 aa, synthetic construct; identical to SEQ ID NO: 10999
  source 1..107: note = Description of Artificial Sequence: Synthetic polypeptide; note = VH of XENP022604

SEQ ID NO: 38705 - protein, 122 aa, synthetic construct; identical to SEQ ID NO: 10908
  source 1..122: note = Description of Artificial Sequence: Synthetic polypeptide; note = VL of XENP022604

SEQ ID NO: 38706 - protein, 231 aa, synthetic construct; identical to SEQ ID NO: 21532
  source 1..231: note = Description of Artificial Sequence: Synthetic polypeptide; note = Fc chain of XENP022604

SEQ ID NO: 38707 - protein, 11 aa, synthetic construct
  source 1..11: note = Description of Artificial Sequence: Synthetic peptide; note = XENP022604 vhCDR1
RASQSVGNDVA

SEQ ID NO: 38708 - protein, 7 aa, synthetic construct
  source 1..7: note = Description of Artificial Sequence: Synthetic peptide; note = XENP022604 vhCDR2
YASHRYT

SEQ ID NO: 38709 - protein, 9 aa, synthetic construct
  source 1..9: note = Description of Artificial Sequence: Synthetic peptide; note = XENP022604 vhCDR3
QQDFSSPRT

SEQ ID NO: 38710 - protein, 5 aa, synthetic construct
  source 1..5: note = Description of Artificial Sequence: Synthetic peptide; note = XENP022604 vlCDR1
NYWMN

SEQ ID NO: 38711 - protein, 19 aa, synthetic construct
  source 1..19: note = Description of Artificial Sequence: Synthetic peptide; note = XENP022604 vlCDR2
EIRLYSNNYATHYAESVKG

SEQ ID NO: 38712 - protein, 11 aa, synthetic construct
  source 1..11: note = Description of Artificial Sequence: Synthetic peptide; note = XENP022604 vlCDR3
YYGNYGGYFDV

SEQ ID NO: 38713 - protein, 218 aa, synthetic construct; identical to SEQ ID NO: 22599
  source 1..218: note = Description of Artificial Sequence: Synthetic polypeptide; note = XENP022604 7G8_H3.30_L1.34-1G6_L1.194_H1.279 Light Chain

SEQ ID NO: 38714 - protein, 111 aa, synthetic construct; identical to SEQ ID NO: 22600
  source 1..111: note = Description of Artificial Sequence: Synthetic polypeptide; note = VL of XENP022604

SEQ ID NO: 38715 - protein, 15 aa, synthetic construct
  source 1..15: note = Description of Artificial Sequence: Synthetic peptide; note = XENP022604 vlCDR1
RASQSVDYDGDSYMN

SEQ ID NO: 38716 - protein, 7 aa, synthetic construct
  source 1..7: note = Description of Artificial Sequence: Synthetic peptide; note = XENP022604 vlCDR2
AASELES

SEQ ID NO: 38717 - protein, 9 aa, synthetic construct
  source 1..9: note = Description of Artificial Sequence: Synthetic peptide; note = XENP022604 vlCDR3
QQSNEDPFT

SEQ ID NO: 38718 - protein, 447 aa, synthetic construct; identical to SEQ ID NO: 22084
  source 1..447: note = Description of Artificial Sequence: Synthetic polypeptide; note = XENP022672 2A11_H1.144_L2.142_Fab-1G6_L1.194_H1.279 Fab-Fc Heavy Chain

SEQ ID NO: 38719 - protein, 118 aa, synthetic construct; identical to SEQ ID NO: 22085
  source 1..118: note = Description of Artificial Sequence: Synthetic polypeptide; note = VH of XENP022672

SEQ ID NO: 38720 - protein, 5 aa, synthetic construct
  source 1..5: note = Description of Artificial Sequence: Synthetic peptide; note = XENP022672 vhCDR1
DYFMH

SEQ ID NO: 38721 - protein, 17 aa, synthetic construct
  source 1..17: note = Description of Artificial Sequence: Synthetic peptide; note = XENP022672 vhCDR2
WIDPELGDTEYAPKFQG

SEQ ID NO: 38722 - protein, 9 aa, synthetic construct
  source 1..9: note = Description of Artificial Sequence: Synthetic peptide; note = XENP022672 vhCDR3
RGVYQALDY

SEQ ID NO: 38723 - protein, 480 aa, synthetic construct; identical to SEQ ID NO: 23221
  source 1..480: note = Description of Artificial Sequence: Synthetic polypeptide; note = XENP022672 2A11_H1.144_L2.142_Fab-1G6_L1.194_H1.279 scFv-Fc Heavy Chain

SEQ ID NO: 38724 - protein, 107 aa, synthetic construct; identical to SEQ ID NO: 10999
  source 1..107: note = Description of Artificial Sequence: Synthetic polypeptide; note = VH of XENP022672

SEQ ID NO: 38725 - protein, 122 aa, synthetic construct; identical to SEQ ID NO: 10908
  source 1..122: note = Description of Artificial Sequence: Synthetic polypeptide; note = VL of XENP022672

SEQ ID NO: 38726 - protein, 231 aa, synthetic construct; identical to SEQ ID NO: 21532
  source 1..231: note = Description of Artificial Sequence: Synthetic polypeptide; note = Fc chain of XENP022672

SEQ ID NO: 38727 - protein, 11 aa, synthetic construct
  source 1..11: note = Description of Artificial Sequence: Synthetic peptide; note = XENP022672 vhCDR1
RASQSVGNDVA

SEQ ID NO: 38728 - protein, 7 aa, synthetic construct
  source 1..7: note = Description of Artificial Sequence: Synthetic peptide; note = XENP022672 vhCDR2
YASHRYT

SEQ ID NO: 38729 - protein, 9 aa, synthetic construct
  source 1..9: note = Description of Artificial Sequence: Synthetic peptide; note = XENP022672 vhCDR3
QQDFSSPRT

SEQ ID NO: 38730 - protein, 5 aa, synthetic construct
  source 1..5: note = Description of Artificial Sequence: Synthetic peptide; note = XENP022672 vlCDR1
NYWMN

SEQ ID NO: 38731 - protein, 19 aa, synthetic construct
  source 1..19: note = Description of Artificial Sequence: Synthetic peptide; note = XENP022672 vlCDR2
EIRLYSNNYATHYAESVKG

SEQ ID NO: 38732 - protein, 11 aa, synthetic construct
  source 1..11: note = Description of Artificial Sequence: Synthetic peptide; note = XENP022672 vlCDR3
YYGNYGGYFDV

SEQ ID NO: 38733 - protein, 214 aa, synthetic construct; identical to SEQ ID NO: 22279
  source 1..214: note = Description of Artificial Sequence: Synthetic polypeptide; note = XENP022672 2A11_H1.144_L2.142_Fab-1G6_L1.194_H1.279 Light Chain

SEQ ID NO: 38734 - protein, 107 aa, synthetic construct; identical to SEQ ID NO: 22280
  source 1..107: note = Description of Artificial Sequence: Synthetic polypeptide; note = VL of XENP022672

SEQ ID NO: 38735 - protein, 11 aa, synthetic construct
  source 1..11: note = Description of Artificial Sequence: Synthetic peptide; note = XENP022672 vlCDR1
QASQDIGNYLN

SEQ ID NO: 38736 - protein, 7 aa, synthetic construct
  source 1..7: note = Description of Artificial Sequence: Synthetic peptide; note = XENP022672 vlCDR2
FTSYLHS

SEQ ID NO: 38737 - protein, 9 aa, synthetic construct
  source 1..9: note = Description of Artificial Sequence: Synthetic peptide; note = XENP022672 vlCDR3
QQGNTLPYT

SEQ ID NO: 38738 - protein, 450 aa, synthetic construct; identical to SEQ ID NO: 35607
  source 1..450: note = Description of Artificial Sequence: Synthetic polypeptide; note = XENP022847 7G8_H3.30_L1.34_Fab-1G6_L1.194_H1.279_scFv  M428L/N434S Fab-Fc Heavy Chain

SEQ ID NO: 38739 - protein, 121 aa, synthetic construct; identical to SEQ ID NO: 22485
  source 1..121: note = Description of Artificial Sequence: Synthetic polypeptide; note = VH of XENP022847

SEQ ID NO: 38740 - protein, 5 aa, synthetic construct
  source 1..5: note = Description of Artificial Sequence: Synthetic peptide; note = XENP022847 vhCDR1
DAWMS

SEQ ID NO: 38741 - protein, 19 aa, synthetic construct
  source 1..19: note = Description of Artificial Sequence: Synthetic peptide; note = XENP022847 vhCDR2
EISTKANNHATYYAESVKG

SEQ ID NO: 38742 - protein, 10 aa, synthetic construct
  source 1..10: note = Description of Artificial Sequence: Synthetic peptide; note = XENP022847 vhCDR3
LATWDWYFDV

SEQ ID NO: 38743 - protein, 480 aa, synthetic construct; identical to SEQ ID NO: 23581
  source 1..480: note = Description of Artificial Sequence: Synthetic polypeptide; note = XENP022847 7G8_H3.30_L1.34_Fab-1G6_L1.194_H1.279_scFv  M428L/N434S scFv-Fc Heavy Chain

SEQ ID NO: 38744 - protein, 107 aa, synthetic construct; identical to SEQ ID NO: 10999
  source 1..107: note = Description of Artificial Sequence: Synthetic polypeptide; note = VH of XENP022847

SEQ ID NO: 38745 - protein, 122 aa, synthetic construct; identical to SEQ ID NO: 10908
  source 1..122: note = Description of Artificial Sequence: Synthetic polypeptide; note = VL of XENP022847

SEQ ID NO: 38746 - protein, 231 aa, synthetic construct; identical to SEQ ID NO: 21572
  source 1..231: note = Description of Artificial Sequence: Synthetic polypeptide; note = Fc chain of XENP022847

SEQ ID NO: 38747 - protein, 11 aa, synthetic construct
  source 1..11: note = Description of Artificial Sequence: Synthetic peptide; note = XENP022847 vhCDR1
RASQSVGNDVA

SEQ ID NO: 38748 - protein, 7 aa, synthetic construct
  source 1..7: note = Description of Artificial Sequence: Synthetic peptide; note = XENP022847 vhCDR2
YASHRYT

SEQ ID NO: 38749 - protein, 9 aa, synthetic construct
  source 1..9: note = Description of Artificial Sequence: Synthetic peptide; note = XENP022847 vhCDR3
QQDFSSPRT

SEQ ID NO: 38750 - protein, 5 aa, synthetic construct
  source 1..5: note = Description of Artificial Sequence: Synthetic peptide; note = XENP022847 vlCDR1
NYWMN

SEQ ID NO: 38751 - protein, 19 aa, synthetic construct
  source 1..19: note = Description of Artificial Sequence: Synthetic peptide; note = XENP022847 vlCDR2
EIRLYSNNYATHYAESVKG

SEQ ID NO: 38752 - protein, 11 aa, synthetic construct
  source 1..11: note = Description of Artificial Sequence: Synthetic peptide; note = XENP022847 vlCDR3
YYGNYGGYFDV

SEQ ID NO: 38753 - protein, 218 aa, synthetic construct; identical to SEQ ID NO: 22599
  source 1..218: note = Description of Artificial Sequence: Synthetic polypeptide; note = XENP022847 7G8_H3.30_L1.34_Fab-1G6_L1.194_H1.279_scFv M428L/N434S Light Chain

SEQ ID NO: 38754 - protein, 111 aa, synthetic construct; identical to SEQ ID NO: 22600
  source 1..111: note = Description of Artificial Sequence: Synthetic polypeptide; note = VL of XENP022847

SEQ ID NO: 38755 - protein, 15 aa, synthetic construct
  source 1..15: note = Description of Artificial Sequence: Synthetic peptide; note = XENP022847 vlCDR1
RASQSVDYDGDSYMN

SEQ ID NO: 38756 - protein, 7 aa, synthetic construct
  source 1..7: note = Description of Artificial Sequence: Synthetic peptide; note = XENP022847 vlCDR2
AASELES

SEQ ID NO: 38757 - protein, 9 aa, synthetic construct
  source 1..9: note = Description of Artificial Sequence: Synthetic peptide; note = XENP022847 vlCDR3
QQSNEDPFT

SEQ ID NO: 38758 - protein, 447 aa, synthetic construct; identical to SEQ ID NO: 35647
  source 1..447: note = Description of Artificial Sequence: Synthetic polypeptide; note = XENP022849 2A11_H1.144_L2.142_Fab-1G6_L1.194_H1.279_scFv M428L/N434S Fab-Fc Heavy Chain

SEQ ID NO: 38759 - protein, 118 aa, synthetic construct; identical to SEQ ID NO: 22085
  source 1..118: note = Description of Artificial Sequence: Synthetic polypeptide; note = VH of XENP022849

SEQ ID NO: 38760 - protein, 5 aa, synthetic construct
  source 1..5: note = Description of Artificial Sequence: Synthetic peptide; note = XENP022849 vhCDR1
DYFMH

SEQ ID NO: 38761 - protein, 17 aa, synthetic construct
  source 1..17: note = Description of Artificial Sequence: Synthetic peptide; note = XENP022849 vhCDR2
WIDPELGDTEYAPKFQG

SEQ ID NO: 38762 - protein, 9 aa, synthetic construct
  source 1..9: note = Description of Artificial Sequence: Synthetic peptide; note = XENP022849 vhCDR3
RGVYQALDY

SEQ ID NO: 38763 - protein, 480 aa, synthetic construct; identical to SEQ ID NO: 23581
  source 1..480: note = Description of Artificial Sequence: Synthetic polypeptide; note = XENP022849 2A11_H1.144_L2.142_Fab-1G6_L1.194_H1.279_scFv M428L/N434S scFv-Fc Heavy Chain

SEQ ID NO: 38764 - protein, 107 aa, synthetic construct; identical to SEQ ID NO: 10999
  source 1..107: note = Description of Artificial Sequence: Synthetic polypeptide; note = VH of XENP022849

SEQ ID NO: 38765 - protein, 122 aa, synthetic construct; identical to SEQ ID NO: 10908
  source 1..122: note = Description of Artificial Sequence: Synthetic polypeptide; note = VL of XENP022849

SEQ ID NO: 38766 - protein, 231 aa, synthetic construct; identical to SEQ ID NO: 21572
  source 1..231: note = Description of Artificial Sequence: Synthetic polypeptide; note = Fc chain of XENP022849

SEQ ID NO: 38767 - protein, 11 aa, synthetic construct
  source 1..11: note = Description of Artificial Sequence: Synthetic peptide; note = XENP022849 vhCDR1
RASQSVGNDVA

SEQ ID NO: 38768 - protein, 7 aa, synthetic construct
  source 1..7: note = Description of Artificial Sequence: Synthetic peptide; note = XENP022849 vhCDR2
YASHRYT

SEQ ID NO: 38769 - protein, 9 aa, synthetic construct
  source 1..9: note = Description of Artificial Sequence: Synthetic peptide; note = XENP022849 vhCDR3
QQDFSSPRT

SEQ ID NO: 38770 - protein, 5 aa, synthetic construct
  source 1..5: note = Description of Artificial Sequence: Synthetic peptide; note = XENP022849 vlCDR1
NYWMN

SEQ ID NO: 38771 - protein, 19 aa, synthetic construct
  source 1..19: note = Description of Artificial Sequence: Synthetic peptide; note = XENP022849 vlCDR2
EIRLYSNNYATHYAESVKG

SEQ ID NO: 38772 - protein, 11 aa, synthetic construct
  source 1..11: note = Description of Artificial Sequence: Synthetic peptide; note = XENP022849 vlCDR3
YYGNYGGYFDV

SEQ ID NO: 38773 - protein, 214 aa, synthetic construct; identical to SEQ ID NO: 22279
  source 1..214: note = Description of Artificial Sequence: Synthetic polypeptide; note = XENP022849 2A11_H1.144_L2.142_Fab-1G6_L1.194_H1.279_scFv M428L/N434S Light Chain

SEQ ID NO: 38774 - protein, 107 aa, synthetic construct; identical to SEQ ID NO: 22280
  source 1..107: note = Description of Artificial Sequence: Synthetic polypeptide; note = VL of XENP022849

SEQ ID NO: 38775 - protein, 11 aa, synthetic construct
  source 1..11: note = Description of Artificial Sequence: Synthetic peptide; note = XENP022849 vlCDR1
QASQDIGNYLN

SEQ ID NO: 38776 - protein, 7 aa, synthetic construct
  source 1..7: note = Description of Artificial Sequence: Synthetic peptide; note = XENP022849 vlCDR2
FTSYLHS

SEQ ID NO: 38777 - protein, 9 aa, synthetic construct
  source 1..9: note = Description of Artificial Sequence: Synthetic peptide; note = XENP022849 vlCDR3
QQGNTLPYT

SEQ ID NO: 38778 - protein, 447 aa, synthetic construct; identical to SEQ ID NO: 22844
  source 1..447: note = Description of Artificial Sequence: Synthetic polypeptide; note = XENP020895 9C6_H0L0-1G6_L1.194_H1.279 Fab-Fc Heavy Chain

SEQ ID NO: 38779 - protein, 118 aa, synthetic construct; identical to SEQ ID NO: 20936
  source 1..118: note = Description of Artificial Sequence: Synthetic polypeptide; note = VH of XENP020895

SEQ ID NO: 38780 - protein, 5 aa, synthetic construct
  source 1..5: note = Description of Artificial Sequence: Synthetic peptide; note = XENP020895 vhCDR1
GYGVN

SEQ ID NO: 38781 - protein, 16 aa, synthetic construct
  source 1..16: note = Description of Artificial Sequence: Synthetic peptide; note = XENP020895 vhCDR2
MIWIDGSTDYNSALKS

SEQ ID NO: 38782 - protein, 10 aa, synthetic construct
  source 1..10: note = Description of Artificial Sequence: Synthetic peptide; note = XENP020895 vhCDR3
DRPDGRAMDY

SEQ ID NO: 38783 - protein, 480 aa, synthetic construct; identical to SEQ ID NO: 23221
  source 1..480: note = Description of Artificial Sequence: Synthetic polypeptide; note = XENP020895 9C6_H0L0-1G6_L1.194_H1.279 scFv-Fc Heavy Chain

SEQ ID NO: 38784 - protein, 107 aa, synthetic construct; identical to SEQ ID NO: 10999
  source 1..107: note = Description of Artificial Sequence: Synthetic polypeptide; note = VH of XENP020895

SEQ ID NO: 38785 - protein, 122 aa, synthetic construct; identical to SEQ ID NO: 10908
  source 1..122: note = Description of Artificial Sequence: Synthetic polypeptide; note = VL of XENP020895

SEQ ID NO: 38786 - protein, 231 aa, synthetic construct; identical to SEQ ID NO: 21532
  source 1..231: note = Description of Artificial Sequence: Synthetic polypeptide; note = Fc chain of XENP020895

SEQ ID NO: 38787 - protein, 11 aa, synthetic construct
  source 1..11: note = Description of Artificial Sequence: Synthetic peptide; note = XENP020895 vhCDR1
RASQSVGNDVA

SEQ ID NO: 38788 - protein, 7 aa, synthetic construct
  source 1..7: note = Description of Artificial Sequence: Synthetic peptide; note = XENP020895 vhCDR2
YASHRYT

SEQ ID NO: 38789 - protein, 9 aa, synthetic construct
  source 1..9: note = Description of Artificial Sequence: Synthetic peptide; note = XENP020895 vhCDR3
QQDFSSPRT

SEQ ID NO: 38790 - protein, 5 aa, synthetic construct
  source 1..5: note = Description of Artificial Sequence: Synthetic peptide; note = XENP020895 vlCDR1
NYWMN

SEQ ID NO: 38791 - protein, 19 aa, synthetic construct
  source 1..19: note = Description of Artificial Sequence: Synthetic peptide; note = XENP020895 vlCDR2
EIRLYSNNYATHYAESVKG

SEQ ID NO: 38792 - protein, 11 aa, synthetic construct
  source 1..11: note = Description of Artificial Sequence: Synthetic peptide; note = XENP020895 vlCDR3
YYGNYGGYFDV

SEQ ID NO: 38793 - protein, 213 aa, synthetic construct; identical to SEQ ID NO: 20940
  source 1..213: note = Description of Artificial Sequence: Synthetic polypeptide; note = XENP020895 9C6_H0L0-1G6_L1.194_H1.279 Light Chain

SEQ ID NO: 38794 - protein, 106 aa, synthetic construct; identical to SEQ ID NO: 20941
  source 1..106: note = Description of Artificial Sequence: Synthetic polypeptide; note = VL of XENP020895

SEQ ID NO: 38795 - protein, 11 aa, synthetic construct
  source 1..11: note = Description of Artificial Sequence: Synthetic peptide; note = XENP020895 vlCDR1
KASQSVSNDVA

SEQ ID NO: 38796 - protein, 7 aa, synthetic construct
  source 1..7: note = Description of Artificial Sequence: Synthetic peptide; note = XENP020895 vlCDR2
YASNRYT

SEQ ID NO: 38797 - protein, 8 aa, synthetic construct
  source 1..8: note = Description of Artificial Sequence: Synthetic peptide; note = XENP020895 vlCDR3
QQDYSSPT

SEQ ID NO: 38798 - protein, 447 aa, synthetic construct; identical to SEQ ID NO: 23236
  source 1..447: note = Description of Artificial Sequence: Synthetic polypeptide; note = XENP021220 9C6_H1.1_L1-1G6_L1.194_H1.279 Fab-Fc Heavy Chain

SEQ ID NO: 38799 - protein, 118 aa, synthetic construct; identical to SEQ ID NO: 21205
  source 1..118: note = Description of Artificial Sequence: Synthetic polypeptide; note = VH of XENP021220

SEQ ID NO: 38800 - protein, 5 aa, synthetic construct
  source 1..5: note = Description of Artificial Sequence: Synthetic peptide; note = XENP021220 vhCDR1
GYGVN

SEQ ID NO: 38801 - protein, 16 aa, synthetic construct
  source 1..16: note = Description of Artificial Sequence: Synthetic peptide; note = XENP021220 vhCDR2
MIWIDGSTDYNSKFQG

SEQ ID NO: 38802 - protein, 10 aa, synthetic construct
  source 1..10: note = Description of Artificial Sequence: Synthetic peptide; note = XENP021220 vhCDR3
DRPDGRAMDY

SEQ ID NO: 38803 - protein, 480 aa, synthetic construct; identical to SEQ ID NO: 23221
  source 1..480: note = Description of Artificial Sequence: Synthetic polypeptide; note = XENP021220 9C6_H1.1_L1-1G6_L1.194_H1.279 scFv-Fc Heavy Chain

SEQ ID NO: 38804 - protein, 107 aa, synthetic construct; identical to SEQ ID NO: 10999
  source 1..107: note = Description of Artificial Sequence: Synthetic polypeptide; note = VH of XENP021220

SEQ ID NO: 38805 - protein, 122 aa, synthetic construct; identical to SEQ ID NO: 10908
  source 1..122: note = Description of Artificial Sequence: Synthetic polypeptide; note = VL of XENP021220

SEQ ID NO: 38806 - protein, 231 aa, synthetic construct; identical to SEQ ID NO: 21532
  source 1..231: note = Description of Artificial Sequence: Synthetic polypeptide; note = Fc chain of XENP021220

SEQ ID NO: 38807 - protein, 11 aa, synthetic construct
  source 1..11: note = Description of Artificial Sequence: Synthetic peptide; note = XENP021220 vhCDR1
RASQSVGNDVA

SEQ ID NO: 38808 - protein, 7 aa, synthetic construct
  source 1..7: note = Description of Artificial Sequence: Synthetic peptide; note = XENP021220 vhCDR2
YASHRYT

SEQ ID NO: 38809 - protein, 9 aa, synthetic construct
  source 1..9: note = Description of Artificial Sequence: Synthetic peptide; note = XENP021220 vhCDR3
QQDFSSPRT

SEQ ID NO: 38810 - protein, 5 aa, synthetic construct
  source 1..5: note = Description of Artificial Sequence: Synthetic peptide; note = XENP021220 vlCDR1
NYWMN

SEQ ID NO: 38811 - protein, 19 aa, synthetic construct
  source 1..19: note = Description of Artificial Sequence: Synthetic peptide; note = XENP021220 vlCDR2
EIRLYSNNYATHYAESVKG

SEQ ID NO: 38812 - protein, 11 aa, synthetic construct
  source 1..11: note = Description of Artificial Sequence: Synthetic peptide; note = XENP021220 vlCDR3
YYGNYGGYFDV

SEQ ID NO: 38813 - protein, 213 aa, synthetic construct; identical to SEQ ID NO: 21050
  source 1..213: note = Description of Artificial Sequence: Synthetic polypeptide; note = XENP021220 9C6_H1.1_L1-1G6_L1.194_H1.279 Light Chain

SEQ ID NO: 38814 - protein, 106 aa, synthetic construct; identical to SEQ ID NO: 21051
  source 1..106: note = Description of Artificial Sequence: Synthetic polypeptide; note = VL of XENP021220

SEQ ID NO: 38815 - protein, 11 aa, synthetic construct
  source 1..11: note = Description of Artificial Sequence: Synthetic peptide; note = XENP021220 vlCDR1
KASQSVSNDVA

SEQ ID NO: 38816 - protein, 7 aa, synthetic construct
  source 1..7: note = Description of Artificial Sequence: Synthetic peptide; note = XENP021220 vlCDR2
YASNRYT

SEQ ID NO: 38817 - protein, 8 aa, synthetic construct
  source 1..8: note = Description of Artificial Sequence: Synthetic peptide; note = XENP021220 vlCDR3
QQDYSSPT

SEQ ID NO: 38818 - protein, 447 aa, synthetic construct; identical to SEQ ID NO: 23256
  source 1..447: note = Description of Artificial Sequence: Synthetic polypeptide; note = XENP021221 9C6_H1.11_L1-1G6_L1.194_H1.279 Fab-Fc Heavy Chain

SEQ ID NO: 38819 - protein, 118 aa, synthetic construct; identical to SEQ ID NO: 21305
  source 1..118: note = Description of Artificial Sequence: Synthetic polypeptide; note = VH of XENP021221

SEQ ID NO: 38820 - protein, 5 aa, synthetic construct
  source 1..5: note = Description of Artificial Sequence: Synthetic peptide; note = XENP021221 vhCDR1
GYGVN

SEQ ID NO: 38821 - protein, 16 aa, synthetic construct
  source 1..16: note = Description of Artificial Sequence: Synthetic peptide; note = XENP021221 vhCDR2
MIWIDGSTDYNSKFQG

SEQ ID NO: 38822 - protein, 10 aa, synthetic construct
  source 1..10: note = Description of Artificial Sequence: Synthetic peptide; note = XENP021221 vhCDR3
DRPDGRAMDY

SEQ ID NO: 38823 - protein, 480 aa, synthetic construct; identical to SEQ ID NO: 23221
  source 1..480: note = Description of Artificial Sequence: Synthetic polypeptide; note = XENP021221 9C6_H1.11_L1-1G6_L1.194_H1.279 scFv-Fc Heavy Chain

SEQ ID NO: 38824 - protein, 107 aa, synthetic construct; identical to SEQ ID NO: 10999
  source 1..107: note = Description of Artificial Sequence: Synthetic polypeptide; note = VH of XENP021221

SEQ ID NO: 38825 - protein, 122 aa, synthetic construct; identical to SEQ ID NO: 10908
  source 1..122: note = Description of Artificial Sequence: Synthetic polypeptide; note = VL of XENP021221

SEQ ID NO: 38826 - protein, 231 aa, synthetic construct; identical to SEQ ID NO: 21532
  source 1..231: note = Description of Artificial Sequence: Synthetic polypeptide; note = Fc chain of XENP021221

SEQ ID NO: 38827 - protein, 11 aa, synthetic construct
  source 1..11: note = Description of Artificial Sequence: Synthetic peptide; note = XENP021221 vhCDR1
RASQSVGNDVA

SEQ ID NO: 38828 - protein, 7 aa, synthetic construct
  source 1..7: note = Description of Artificial Sequence: Synthetic peptide; note = XENP021221 vhCDR2
YASHRYT

SEQ ID NO: 38829 - protein, 9 aa, synthetic construct
  source 1..9: note = Description of Artificial Sequence: Synthetic peptide; note = XENP021221 vhCDR3
QQDFSSPRT

SEQ ID NO: 38830 - protein, 5 aa, synthetic construct
  source 1..5: note = Description of Artificial Sequence: Synthetic peptide; note = XENP021221 vlCDR1
NYWMN

SEQ ID NO: 38831 - protein, 19 aa, synthetic construct
  source 1..19: note = Description of Artificial Sequence: Synthetic peptide; note = XENP021221 vlCDR2
EIRLYSNNYATHYAESVKG

SEQ ID NO: 38832 - protein, 11 aa, synthetic construct
  source 1..11: note = Description of Artificial Sequence: Synthetic peptide; note = XENP021221 vlCDR3
YYGNYGGYFDV

SEQ ID NO: 38833 - protein, 213 aa, synthetic construct; identical to SEQ ID NO: 21050
  source 1..213: note = Description of Artificial Sequence: Synthetic polypeptide; note = XENP021221 9C6_H1.11_L1-1G6_L1.194_H1.279 Light Chain

SEQ ID NO: 38834 - protein, 106 aa, synthetic construct; identical to SEQ ID NO: 21051
  source 1..106: note = Description of Artificial Sequence: Synthetic polypeptide; note = VL of XENP021221

SEQ ID NO: 38835 - protein, 11 aa, synthetic construct
  source 1..11: note = Description of Artificial Sequence: Synthetic peptide; note = XENP021221 vlCDR1
KASQSVSNDVA

SEQ ID NO: 38836 - protein, 7 aa, synthetic construct
  source 1..7: note = Description of Artificial Sequence: Synthetic peptide; note = XENP021221 vlCDR2
YASNRYT

SEQ ID NO: 38837 - protein, 8 aa, synthetic construct
  source 1..8: note = Description of Artificial Sequence: Synthetic peptide; note = XENP021221 vlCDR3
QQDYSSPT

SEQ ID NO: 38838 - protein, 447 aa, synthetic construct; identical to SEQ ID NO: 36147
  source 1..447: note = Description of Artificial Sequence: Synthetic polypeptide; note = XENP022858 9C6_H1.1_L1_Fab-1G6_L1.194_H1.279_scFv M428L/N434S Fab-Fc Heavy Chain

SEQ ID NO: 38839 - protein, 118 aa, synthetic construct; identical to SEQ ID NO: 21205
  source 1..118: note = Description of Artificial Sequence: Synthetic polypeptide; note = VH of XENP022858

SEQ ID NO: 38840 - protein, 5 aa, synthetic construct
  source 1..5: note = Description of Artificial Sequence: Synthetic peptide; note = XENP022858 vhCDR1
GYGVN

SEQ ID NO: 38841 - protein, 16 aa, synthetic construct
  source 1..16: note = Description of Artificial Sequence: Synthetic peptide; note = XENP022858 vhCDR2
MIWIDGSTDYNSKFQG

SEQ ID NO: 38842 - protein, 10 aa, synthetic construct
  source 1..10: note = Description of Artificial Sequence: Synthetic peptide; note = XENP022858 vhCDR3
DRPDGRAMDY

SEQ ID NO: 38843 - protein, 480 aa, synthetic construct; identical to SEQ ID NO: 23581
  source 1..480: note = Description of Artificial Sequence: Synthetic polypeptide; note = XENP022858 9C6_H1.1_L1_Fab-1G6_L1.194_H1.279_scFv M428L/N434S scFv-Fc Heavy Chain

SEQ ID NO: 38844 - protein, 107 aa, synthetic construct; identical to SEQ ID NO: 10999
  source 1..107: note = Description of Artificial Sequence: Synthetic polypeptide; note = VH of XENP022858

SEQ ID NO: 38845 - protein, 122 aa, synthetic construct; identical to SEQ ID NO: 10908
  source 1..122: note = Description of Artificial Sequence: Synthetic polypeptide; note = VL of XENP022858

SEQ ID NO: 38846 - protein, 231 aa, synthetic construct; identical to SEQ ID NO: 21572
  source 1..231: note = Description of Artificial Sequence: Synthetic polypeptide; note = Fc chain of XENP022858

SEQ ID NO: 38847 - protein, 11 aa, synthetic construct
  source 1..11: note = Description of Artificial Sequence: Synthetic peptide; note = XENP022858 vhCDR1
RASQSVGNDVA

SEQ ID NO: 38848 - protein, 7 aa, synthetic construct
  source 1..7: note = Description of Artificial Sequence: Synthetic peptide; note = XENP022858 vhCDR2
YASHRYT

SEQ ID NO: 38849 - protein, 9 aa, synthetic construct
  source 1..9: note = Description of Artificial Sequence: Synthetic peptide; note = XENP022858 vhCDR3
QQDFSSPRT

SEQ ID NO: 38850 - protein, 5 aa, synthetic construct
  source 1..5: note = Description of Artificial Sequence: Synthetic peptide; note = XENP022858 vlCDR1
NYWMN

SEQ ID NO: 38851 - protein, 19 aa, synthetic construct
  source 1..19: note = Description of Artificial Sequence: Synthetic peptide; note = XENP022858 vlCDR2
EIRLYSNNYATHYAESVKG

SEQ ID NO: 38852 - protein, 11 aa, synthetic construct
  source 1..11: note = Description of Artificial Sequence: Synthetic peptide; note = XENP022858 vlCDR3
YYGNYGGYFDV

SEQ ID NO: 38853 - protein, 213 aa, synthetic construct; identical to SEQ ID NO: 21050
  source 1..213: note = Description of Artificial Sequence: Synthetic polypeptide; note = XENP022858 9C6_H1.1_L1_Fab-1G6_L1.194_H1.279_scFv M428L/N434S Light Chain

SEQ ID NO: 38854 - protein, 106 aa, synthetic construct; identical to SEQ ID NO: 21051
  source 1..106: note = Description of Artificial Sequence: Synthetic polypeptide; note = VL of XENP022858

SEQ ID NO: 38855 - protein, 11 aa, synthetic construct
  source 1..11: note = Description of Artificial Sequence: Synthetic peptide; note = XENP022858 vlCDR1
KASQSVSNDVA

SEQ ID NO: 38856 - protein, 7 aa, synthetic construct
  source 1..7: note = Description of Artificial Sequence: Synthetic peptide; note = XENP022858 vlCDR2
YASNRYT

SEQ ID NO: 38857 - protein, 8 aa, synthetic construct
  source 1..8: note = Description of Artificial Sequence: Synthetic peptide; note = XENP022858 vlCDR3
QQDYSSPT

SEQ ID NO: 38858 - protein, 447 aa, synthetic construct; identical to SEQ ID NO: 17235
  source 1..447: note = Description of Artificial Sequence: Synthetic polypeptide; note = XENP020153 2A11_H1L2-[CTLA-4]_H3.4_L0.12 Fab-Fc Heavy Chain

SEQ ID NO: 38859 - protein, 118 aa, synthetic construct; identical to SEQ ID NO: 17236
  source 1..118: note = Description of Artificial Sequence: Synthetic polypeptide; note = VH of XENP020153

SEQ ID NO: 38860 - protein, 5 aa, synthetic construct
  source 1..5: note = Description of Artificial Sequence: Synthetic peptide; note = XENP020153 vhCDR1
DYYMH

SEQ ID NO: 38861 - protein, 17 aa, synthetic construct
  source 1..17: note = Description of Artificial Sequence: Synthetic peptide; note = XENP020153 vhCDR2
WIDPENGDTEYAPKFQG

SEQ ID NO: 38862 - protein, 9 aa, synthetic construct
  source 1..9: note = Description of Artificial Sequence: Synthetic peptide; note = XENP020153 vhCDR3
RGVRQALDY

SEQ ID NO: 38863 - protein, 477 aa, synthetic construct; identical to SEQ ID NO: 21549
  source 1..477: note = Description of Artificial Sequence: Synthetic polypeptide; note = XENP020153 2A11_H1L2-[CTLA-4]_H3.4_L0.12 scFv-Fc Heavy Chain

SEQ ID NO: 38864 - protein, 118 aa, synthetic construct; identical to SEQ ID NO: 2461
  source 1..118: note = Description of Artificial Sequence: Synthetic polypeptide; note = VH of XENP020153

SEQ ID NO: 38865 - protein, 108 aa, synthetic construct; identical to SEQ ID NO: 1517
  source 1..108: note = Description of Artificial Sequence: Synthetic polypeptide; note = VL of XENP020153

SEQ ID NO: 38866 - protein, 231 aa, synthetic construct; identical to SEQ ID NO: 21532
  source 1..231: note = Description of Artificial Sequence: Synthetic polypeptide; note = Fc chain of XENP020153

SEQ ID NO: 38867 - protein, 5 aa, synthetic construct
  source 1..5: note = Description of Artificial Sequence: Synthetic peptide; note = XENP020153 vhCDR1
SYTMH

SEQ ID NO: 38868 - protein, 17 aa, synthetic construct
  source 1..17: note = Description of Artificial Sequence: Synthetic peptide; note = XENP020153 vhCDR2
FISYDGNHKYYADSVKG

SEQ ID NO: 38869 - protein, 9 aa, synthetic construct
  source 1..9: note = Description of Artificial Sequence: Synthetic peptide; note = XENP020153 vhCDR3
TGHLGPFDL

SEQ ID NO: 38870 - protein, 12 aa, synthetic construct
  source 1..12: note = Description of Artificial Sequence: Synthetic peptide; note = XENP020153 vlCDR1
RASQSVGSSYLA

SEQ ID NO: 38871 - protein, 7 aa, synthetic construct
  source 1..7: note = Description of Artificial Sequence: Synthetic peptide; note = XENP020153 vlCDR2
GAFSRAT

SEQ ID NO: 38872 - protein, 9 aa, synthetic construct
  source 1..9: note = Description of Artificial Sequence: Synthetic peptide; note = XENP020153 vlCDR3
QQYGSSPWT

SEQ ID NO: 38873 - protein, 214 aa, synthetic construct; identical to SEQ ID NO: 17250
  source 1..214: note = Description of Artificial Sequence: Synthetic polypeptide; note = XENP020153 2A11_H1L2-[CTLA-4]_H3.4_L0.12 Light Chain

SEQ ID NO: 38874 - protein, 107 aa, synthetic construct; identical to SEQ ID NO: 17251
  source 1..107: note = Description of Artificial Sequence: Synthetic polypeptide; note = VL of XENP020153

SEQ ID NO: 38875 - protein, 11 aa, synthetic construct
  source 1..11: note = Description of Artificial Sequence: Synthetic peptide; note = XENP020153 vlCDR1
QASQDIGNYLN

SEQ ID NO: 38876 - protein, 7 aa, synthetic construct
  source 1..7: note = Description of Artificial Sequence: Synthetic peptide; note = XENP020153 vlCDR2
YTSRLHS

SEQ ID NO: 38877 - protein, 9 aa, synthetic construct
  source 1..9: note = Description of Artificial Sequence: Synthetic peptide; note = XENP020153 vlCDR3
QQGNTLPYT

SEQ ID NO: 38878 - protein, 450 aa, synthetic construct; identical to SEQ ID NO: 22304
  source 1..450: note = Description of Artificial Sequence: Synthetic polypeptide; note = XENP020833 7G8_H3L1_Fab-[CTLA-4]_H3.23_L0.129 Fab-Fc Heavy Chain

SEQ ID NO: 38879 - protein, 121 aa, synthetic construct; identical to SEQ ID NO: 17806
  source 1..121: note = Description of Artificial Sequence: Synthetic polypeptide; note = VH of XENP020833

SEQ ID NO: 38880 - protein, 5 aa, synthetic construct
  source 1..5: note = Description of Artificial Sequence: Synthetic peptide; note = XENP020833 vhCDR1
DAWMD

SEQ ID NO: 38881 - protein, 19 aa, synthetic construct
  source 1..19: note = Description of Artificial Sequence: Synthetic peptide; note = XENP020833 vhCDR2
EIRTKANNHATYYAESVKG

SEQ ID NO: 38882 - protein, 10 aa, synthetic construct
  source 1..10: note = Description of Artificial Sequence: Synthetic peptide; note = XENP020833 vhCDR3
LANWDWYFDV

SEQ ID NO: 38883 - protein, 477 aa, synthetic construct; identical to SEQ ID NO: 21669
  source 1..477: note = Description of Artificial Sequence: Synthetic polypeptide; note = XENP020833 7G8_H3L1_Fab-[CTLA-4]_H3.23_L0.129 scFv-Fc Heavy Chain

SEQ ID NO: 38884 - protein, 118 aa, synthetic construct; identical to SEQ ID NO: 2632
  source 1..118: note = Description of Artificial Sequence: Synthetic polypeptide; note = VH of XENP020833

SEQ ID NO: 38885 - protein, 108 aa, synthetic construct; identical to SEQ ID NO: 2768
  source 1..108: note = Description of Artificial Sequence: Synthetic polypeptide; note = VL of XENP020833

SEQ ID NO: 38886 - protein, 231 aa, synthetic construct; identical to SEQ ID NO: 21532
  source 1..231: note = Description of Artificial Sequence: Synthetic polypeptide; note = Fc chain of XENP020833

SEQ ID NO: 38887 - protein, 5 aa, synthetic construct
  source 1..5: note = Description of Artificial Sequence: Synthetic peptide; note = XENP020833 vhCDR1
SYTMH

SEQ ID NO: 38888 - protein, 17 aa, synthetic construct
  source 1..17: note = Description of Artificial Sequence: Synthetic peptide; note = XENP020833 vhCDR2
FISYDGNYKYYADSVKG

SEQ ID NO: 38889 - protein, 9 aa, synthetic construct
  source 1..9: note = Description of Artificial Sequence: Synthetic peptide; note = XENP020833 vhCDR3
GGHLGPFDL

SEQ ID NO: 38890 - protein, 12 aa, synthetic construct
  source 1..12: note = Description of Artificial Sequence: Synthetic peptide; note = XENP020833 vlCDR1
RASQSVGSSYLA

SEQ ID NO: 38891 - protein, 7 aa, synthetic construct
  source 1..7: note = Description of Artificial Sequence: Synthetic peptide; note = XENP020833 vlCDR2
GASSRAT

SEQ ID NO: 38892 - protein, 9 aa, synthetic construct
  source 1..9: note = Description of Artificial Sequence: Synthetic peptide; note = XENP020833 vlCDR3
QQYGSSPWT

SEQ ID NO: 38893 - protein, 218 aa, synthetic construct; identical to SEQ ID NO: 17600
  source 1..218: note = Description of Artificial Sequence: Synthetic polypeptide; note = XENP020833 7G8_H3L1_Fab-[CTLA-4]_H3.23_L0.129 Light Chain

SEQ ID NO: 38894 - protein, 111 aa, synthetic construct; identical to SEQ ID NO: 17601
  source 1..111: note = Description of Artificial Sequence: Synthetic polypeptide; note = VL of XENP020833

SEQ ID NO: 38895 - protein, 15 aa, synthetic construct
  source 1..15: note = Description of Artificial Sequence: Synthetic peptide; note = XENP020833 vlCDR1
RASQSVDYDGDSYMN

SEQ ID NO: 38896 - protein, 7 aa, synthetic construct
  source 1..7: note = Description of Artificial Sequence: Synthetic peptide; note = XENP020833 vlCDR2
AASNLES

SEQ ID NO: 38897 - protein, 9 aa, synthetic construct
  source 1..9: note = Description of Artificial Sequence: Synthetic peptide; note = XENP020833 vlCDR3
QQSNEDPFT

SEQ ID NO: 38898 - protein, 447 aa, synthetic construct; identical to SEQ ID NO: 17235
  source 1..447: note = Description of Artificial Sequence: Synthetic polypeptide; note = XENP021859 2A11_H1_L2.47_Fab-[CTLA-4]_H3.23_L0.129 Fab-Fc Heavy Chain

SEQ ID NO: 38899 - protein, 118 aa, synthetic construct; identical to SEQ ID NO: 17236
  source 1..118: note = Description of Artificial Sequence: Synthetic polypeptide; note = VH of XENP021859

SEQ ID NO: 38900 - protein, 5 aa, synthetic construct
  source 1..5: note = Description of Artificial Sequence: Synthetic peptide; note = XENP021859 vhCDR1
DYYMH

SEQ ID NO: 38901 - protein, 17 aa, synthetic construct
  source 1..17: note = Description of Artificial Sequence: Synthetic peptide; note = XENP021859 vhCDR2
WIDPENGDTEYAPKFQG

SEQ ID NO: 38902 - protein, 9 aa, synthetic construct
  source 1..9: note = Description of Artificial Sequence: Synthetic peptide; note = XENP021859 vhCDR3
RGVRQALDY

SEQ ID NO: 38903 - protein, 477 aa, synthetic construct; identical to SEQ ID NO: 21669
  source 1..477: note = Description of Artificial Sequence: Synthetic polypeptide; note = XENP021859 2A11_H1_L2.47_Fab-[CTLA-4]_H3.23_L0.129 scFv-Fc Heavy Chain

SEQ ID NO: 38904 - protein, 118 aa, synthetic construct; identical to SEQ ID NO: 2632
  source 1..118: note = Description of Artificial Sequence: Synthetic polypeptide; note = VH of XENP021859

SEQ ID NO: 38905 - protein, 108 aa, synthetic construct; identical to SEQ ID NO: 2768
  source 1..108: note = Description of Artificial Sequence: Synthetic polypeptide; note = VL of XENP021859

SEQ ID NO: 38906 - protein, 231 aa, synthetic construct; identical to SEQ ID NO: 21532
  source 1..231: note = Description of Artificial Sequence: Synthetic polypeptide; note = Fc chain of XENP021859

SEQ ID NO: 38907 - protein, 5 aa, synthetic construct
  source 1..5: note = Description of Artificial Sequence: Synthetic peptide; note = XENP021859 vhCDR1
SYTMH

SEQ ID NO: 38908 - protein, 17 aa, synthetic construct
  source 1..17: note = Description of Artificial Sequence: Synthetic peptide; note = XENP021859 vhCDR2
FISYDGNYKYYADSVKG

SEQ ID NO: 38909 - protein, 9 aa, synthetic construct
  source 1..9: note = Description of Artificial Sequence: Synthetic peptide; note = XENP021859 vhCDR3
GGHLGPFDL

SEQ ID NO: 38910 - protein, 12 aa, synthetic construct
  source 1..12: note = Description of Artificial Sequence: Synthetic peptide; note = XENP021859 vlCDR1
RASQSVGSSYLA

SEQ ID NO: 38911 - protein, 7 aa, synthetic construct
  source 1..7: note = Description of Artificial Sequence: Synthetic peptide; note = XENP021859 vlCDR2
GASSRAT

SEQ ID NO: 38912 - protein, 9 aa, synthetic construct
  source 1..9: note = Description of Artificial Sequence: Synthetic peptide; note = XENP021859 vlCDR3
QQYGSSPWT

SEQ ID NO: 38913 - protein, 214 aa, synthetic construct; identical to SEQ ID NO: 22039
  source 1..214: note = Description of Artificial Sequence: Synthetic polypeptide; note = XENP021859 2A11_H1_L2.47_Fab-[CTLA-4]_H3.23_L0.129 Light Chain

SEQ ID NO: 38914 - protein, 107 aa, synthetic construct; identical to SEQ ID NO: 22040
  source 1..107: note = Description of Artificial Sequence: Synthetic polypeptide; note = VL of XENP021859

SEQ ID NO: 38915 - protein, 11 aa, synthetic construct
  source 1..11: note = Description of Artificial Sequence: Synthetic peptide; note = XENP021859 vlCDR1
QASQDIGNYLN

SEQ ID NO: 38916 - protein, 7 aa, synthetic construct
  source 1..7: note = Description of Artificial Sequence: Synthetic peptide; note = XENP021859 vlCDR2
YTSHLHS

SEQ ID NO: 38917 - protein, 9 aa, synthetic construct
  source 1..9: note = Description of Artificial Sequence: Synthetic peptide; note = XENP021859 vlCDR3
QQGNTLPYT

SEQ ID NO: 38918 - protein, 447 aa, synthetic construct; identical to SEQ ID NO: 17235
  source 1..447: note = Description of Artificial Sequence: Synthetic polypeptide; note = XENP021860 2A11_H1_L2.50_Fab-[CTLA-4]_H3.23_L0.129 Fab-Fc Heavy Chain

SEQ ID NO: 38919 - protein, 118 aa, synthetic construct; identical to SEQ ID NO: 17236
  source 1..118: note = Description of Artificial Sequence: Synthetic polypeptide; note = VH of XENP021860

SEQ ID NO: 38920 - protein, 5 aa, synthetic construct
  source 1..5: note = Description of Artificial Sequence: Synthetic peptide; note = XENP021860 vhCDR1
DYYMH

SEQ ID NO: 38921 - protein, 17 aa, synthetic construct
  source 1..17: note = Description of Artificial Sequence: Synthetic peptide; note = XENP021860 vhCDR2
WIDPENGDTEYAPKFQG

SEQ ID NO: 38922 - protein, 9 aa, synthetic construct
  source 1..9: note = Description of Artificial Sequence: Synthetic peptide; note = XENP021860 vhCDR3
RGVRQALDY

SEQ ID NO: 38923 - protein, 477 aa, synthetic construct; identical to SEQ ID NO: 21669
  source 1..477: note = Description of Artificial Sequence: Synthetic polypeptide; note = XENP021860 2A11_H1_L2.50_Fab-[CTLA-4]_H3.23_L0.129 scFv-Fc Heavy Chain

SEQ ID NO: 38924 - protein, 118 aa, synthetic construct; identical to SEQ ID NO: 2632
  source 1..118: note = Description of Artificial Sequence: Synthetic polypeptide; note = VH of XENP021860

SEQ ID NO: 38925 - protein, 108 aa, synthetic construct; identical to SEQ ID NO: 2768
  source 1..108: note = Description of Artificial Sequence: Synthetic polypeptide; note = VL of XENP021860

SEQ ID NO: 38926 - protein, 231 aa, synthetic construct; identical to SEQ ID NO: 21532
  source 1..231: note = Description of Artificial Sequence: Synthetic polypeptide; note = Fc chain of XENP021860

SEQ ID NO: 38927 - protein, 5 aa, synthetic construct
  source 1..5: note = Description of Artificial Sequence: Synthetic peptide; note = XENP021860 vhCDR1
SYTMH

SEQ ID NO: 38928 - protein, 17 aa, synthetic construct
  source 1..17: note = Description of Artificial Sequence: Synthetic peptide; note = XENP021860 vhCDR2
FISYDGNYKYYADSVKG

SEQ ID NO: 38929 - protein, 9 aa, synthetic construct
  source 1..9: note = Description of Artificial Sequence: Synthetic peptide; note = XENP021860 vhCDR3
GGHLGPFDL

SEQ ID NO: 38930 - protein, 12 aa, synthetic construct
  source 1..12: note = Description of Artificial Sequence: Synthetic peptide; note = XENP021860 vlCDR1
RASQSVGSSYLA

SEQ ID NO: 38931 - protein, 7 aa, synthetic construct
  source 1..7: note = Description of Artificial Sequence: Synthetic peptide; note = XENP021860 vlCDR2
GASSRAT

SEQ ID NO: 38932 - protein, 9 aa, synthetic construct
  source 1..9: note = Description of Artificial Sequence: Synthetic peptide; note = XENP021860 vlCDR3
QQYGSSPWT

SEQ ID NO: 38933 - protein, 214 aa, synthetic construct; identical to SEQ ID NO: 22059
  source 1..214: note = Description of Artificial Sequence: Synthetic polypeptide; note = XENP021860 2A11_H1_L2.50_Fab-[CTLA-4]_H3.23_L0.129 Light Chain

SEQ ID NO: 38934 - protein, 107 aa, synthetic construct; identical to SEQ ID NO: 22060
  source 1..107: note = Description of Artificial Sequence: Synthetic polypeptide; note = VL of XENP021860

SEQ ID NO: 38935 - protein, 11 aa, synthetic construct
  source 1..11: note = Description of Artificial Sequence: Synthetic peptide; note = XENP021860 vlCDR1
QASQDIGNYLN

SEQ ID NO: 38936 - protein, 7 aa, synthetic construct
  source 1..7: note = Description of Artificial Sequence: Synthetic peptide; note = XENP021860 vlCDR2
YTSYLHS

SEQ ID NO: 38937 - protein, 9 aa, synthetic construct
  source 1..9: note = Description of Artificial Sequence: Synthetic peptide; note = XENP021860 vlCDR3
QQGNTLPYT

SEQ ID NO: 38938 - protein, 450 aa, synthetic construct; identical to SEQ ID NO: 22324
  source 1..450: note = Description of Artificial Sequence: Synthetic polypeptide; note = XENP021895 7G8_H3.18_L1-[CTLA-4]_H3.23_L0.129 Fab-Fc Heavy Chain

SEQ ID NO: 38939 - protein, 121 aa, synthetic construct; identical to SEQ ID NO: 22325
  source 1..121: note = Description of Artificial Sequence: Synthetic polypeptide; note = VH of XENP021895

SEQ ID NO: 38940 - protein, 5 aa, synthetic construct
  source 1..5: note = Description of Artificial Sequence: Synthetic peptide; note = XENP021895 vhCDR1
DAWMD

SEQ ID NO: 38941 - protein, 19 aa, synthetic construct
  source 1..19: note = Description of Artificial Sequence: Synthetic peptide; note = XENP021895 vhCDR2
EISTKANNHATYYAESVKG

SEQ ID NO: 38942 - protein, 10 aa, synthetic construct
  source 1..10: note = Description of Artificial Sequence: Synthetic peptide; note = XENP021895 vhCDR3
LATWDWYFDV

SEQ ID NO: 38943 - protein, 477 aa, synthetic construct; identical to SEQ ID NO: 21669
  source 1..477: note = Description of Artificial Sequence: Synthetic polypeptide; note = XENP021895 7G8_H3.18_L1-[CTLA-4]_H3.23_L0.129 scFv-Fc Heavy Chain

SEQ ID NO: 38944 - protein, 118 aa, synthetic construct; identical to SEQ ID NO: 2632
  source 1..118: note = Description of Artificial Sequence: Synthetic polypeptide; note = VH of XENP021895

SEQ ID NO: 38945 - protein, 108 aa, synthetic construct; identical to SEQ ID NO: 2768
  source 1..108: note = Description of Artificial Sequence: Synthetic polypeptide; note = VL of XENP021895

SEQ ID NO: 38946 - protein, 231 aa, synthetic construct; identical to SEQ ID NO: 21532
  source 1..231: note = Description of Artificial Sequence: Synthetic polypeptide; note = Fc chain of XENP021895

SEQ ID NO: 38947 - protein, 5 aa, synthetic construct
  source 1..5: note = Description of Artificial Sequence: Synthetic peptide; note = XENP021895 vhCDR1
SYTMH

SEQ ID NO: 38948 - protein, 17 aa, synthetic construct
  source 1..17: note = Description of Artificial Sequence: Synthetic peptide; note = XENP021895 vhCDR2
FISYDGNYKYYADSVKG

SEQ ID NO: 38949 - protein, 9 aa, synthetic construct
  source 1..9: note = Description of Artificial Sequence: Synthetic peptide; note = XENP021895 vhCDR3
GGHLGPFDL

SEQ ID NO: 38950 - protein, 12 aa, synthetic construct
  source 1..12: note = Description of Artificial Sequence: Synthetic peptide; note = XENP021895 vlCDR1
RASQSVGSSYLA

SEQ ID NO: 38951 - protein, 7 aa, synthetic construct
  source 1..7: note = Description of Artificial Sequence: Synthetic peptide; note = XENP021895 vlCDR2
GASSRAT

SEQ ID NO: 38952 - protein, 9 aa, synthetic construct
  source 1..9: note = Description of Artificial Sequence: Synthetic peptide; note = XENP021895 vlCDR3
QQYGSSPWT

SEQ ID NO: 38953 - protein, 218 aa, synthetic construct; identical to SEQ ID NO: 17600
  source 1..218: note = Description of Artificial Sequence: Synthetic polypeptide; note = XENP021895 7G8_H3.18_L1-[CTLA-4]_H3.23_L0.129 Light Chain

SEQ ID NO: 38954 - protein, 111 aa, synthetic construct; identical to SEQ ID NO: 17601
  source 1..111: note = Description of Artificial Sequence: Synthetic polypeptide; note = VL of XENP021895

SEQ ID NO: 38955 - protein, 15 aa, synthetic construct
  source 1..15: note = Description of Artificial Sequence: Synthetic peptide; note = XENP021895 vlCDR1
RASQSVDYDGDSYMN

SEQ ID NO: 38956 - protein, 7 aa, synthetic construct
  source 1..7: note = Description of Artificial Sequence: Synthetic peptide; note = XENP021895 vlCDR2
AASNLES

SEQ ID NO: 38957 - protein, 9 aa, synthetic construct
  source 1..9: note = Description of Artificial Sequence: Synthetic peptide; note = XENP021895 vlCDR3
QQSNEDPFT

SEQ ID NO: 38958 - protein, 450 aa, synthetic construct; identical to SEQ ID NO: 22324
  source 1..450: note = Description of Artificial Sequence: Synthetic polypeptide; note = XENP021896 7G8_H3.18_L1.11-[CTLA-4]_H3.23_L0.129 Fab-Fc Heavy Chain

SEQ ID NO: 38959 - protein, 121 aa, synthetic construct; identical to SEQ ID NO: 22325
  source 1..121: note = Description of Artificial Sequence: Synthetic polypeptide; note = VH of XENP021896

SEQ ID NO: 38960 - protein, 5 aa, synthetic construct
  source 1..5: note = Description of Artificial Sequence: Synthetic peptide; note = XENP021896 vhCDR1
DAWMD

SEQ ID NO: 38961 - protein, 19 aa, synthetic construct
  source 1..19: note = Description of Artificial Sequence: Synthetic peptide; note = XENP021896 vhCDR2
EISTKANNHATYYAESVKG

SEQ ID NO: 38962 - protein, 10 aa, synthetic construct
  source 1..10: note = Description of Artificial Sequence: Synthetic peptide; note = XENP021896 vhCDR3
LATWDWYFDV

SEQ ID NO: 38963 - protein, 477 aa, synthetic construct; identical to SEQ ID NO: 21669
  source 1..477: note = Description of Artificial Sequence: Synthetic polypeptide; note = XENP021896 7G8_H3.18_L1.11-[CTLA-4]_H3.23_L0.129 scFv-Fc Heavy Chain

SEQ ID NO: 38964 - protein, 118 aa, synthetic construct; identical to SEQ ID NO: 2632
  source 1..118: note = Description of Artificial Sequence: Synthetic polypeptide; note = VH of XENP021896

SEQ ID NO: 38965 - protein, 108 aa, synthetic construct; identical to SEQ ID NO: 2768
  source 1..108: note = Description of Artificial Sequence: Synthetic polypeptide; note = VL of XENP021896

SEQ ID NO: 38966 - protein, 231 aa, synthetic construct; identical to SEQ ID NO: 21532
  source 1..231: note = Description of Artificial Sequence: Synthetic polypeptide; note = Fc chain of XENP021896

SEQ ID NO: 38967 - protein, 5 aa, synthetic construct
  source 1..5: note = Description of Artificial Sequence: Synthetic peptide; note = XENP021896 vhCDR1
SYTMH

SEQ ID NO: 38968 - protein, 17 aa, synthetic construct
  source 1..17: note = Description of Artificial Sequence: Synthetic peptide; note = XENP021896 vhCDR2
FISYDGNYKYYADSVKG

SEQ ID NO: 38969 - protein, 9 aa, synthetic construct
  source 1..9: note = Description of Artificial Sequence: Synthetic peptide; note = XENP021896 vhCDR3
GGHLGPFDL

SEQ ID NO: 38970 - protein, 12 aa, synthetic construct
  source 1..12: note = Description of Artificial Sequence: Synthetic peptide; note = XENP021896 vlCDR1
RASQSVGSSYLA

SEQ ID NO: 38971 - protein, 7 aa, synthetic construct
  source 1..7: note = Description of Artificial Sequence: Synthetic peptide; note = XENP021896 vlCDR2
GASSRAT

SEQ ID NO: 38972 - protein, 9 aa, synthetic construct
  source 1..9: note = Description of Artificial Sequence: Synthetic peptide; note = XENP021896 vlCDR3
QQYGSSPWT

SEQ ID NO: 38973 - protein, 218 aa, synthetic construct; identical to SEQ ID NO: 22359
  source 1..218: note = Description of Artificial Sequence: Synthetic polypeptide; note = XENP021896 7G8_H3.18_L1.11-[CTLA-4]_H3.23_L0.129 Light Chain

SEQ ID NO: 38974 - protein, 111 aa, synthetic construct; identical to SEQ ID NO: 22360
  source 1..111: note = Description of Artificial Sequence: Synthetic polypeptide; note = VL of XENP021896

SEQ ID NO: 38975 - protein, 15 aa, synthetic construct
  source 1..15: note = Description of Artificial Sequence: Synthetic peptide; note = XENP021896 vlCDR1
RASQSVDYDGDSYMN

SEQ ID NO: 38976 - protein, 7 aa, synthetic construct
  source 1..7: note = Description of Artificial Sequence: Synthetic peptide; note = XENP021896 vlCDR2
AASELES

SEQ ID NO: 38977 - protein, 9 aa, synthetic construct
  source 1..9: note = Description of Artificial Sequence: Synthetic peptide; note = XENP021896 vlCDR3
QQSNEDPFT

SEQ ID NO: 38978 - protein, 450 aa, synthetic construct; identical to SEQ ID NO: 22384
  source 1..450: note = Description of Artificial Sequence: Synthetic polypeptide; note = XENP021902 7G8_H3.23_L1.11-[CTLA-4]_H3.23_L0.129 Fab-Fc Heavy Chain

SEQ ID NO: 38979 - protein, 121 aa, synthetic construct; identical to SEQ ID NO: 22385
  source 1..121: note = Description of Artificial Sequence: Synthetic polypeptide; note = VH of XENP021902

SEQ ID NO: 38980 - protein, 5 aa, synthetic construct
  source 1..5: note = Description of Artificial Sequence: Synthetic peptide; note = XENP021902 vhCDR1
DAWMD

SEQ ID NO: 38981 - protein, 19 aa, synthetic construct
  source 1..19: note = Description of Artificial Sequence: Synthetic peptide; note = XENP021902 vhCDR2
EISTKANNHATYYAESVKG

SEQ ID NO: 38982 - protein, 10 aa, synthetic construct
  source 1..10: note = Description of Artificial Sequence: Synthetic peptide; note = XENP021902 vhCDR3
LATWDWYFDV

SEQ ID NO: 38983 - protein, 477 aa, synthetic construct; identical to SEQ ID NO: 21669
  source 1..477: note = Description of Artificial Sequence: Synthetic polypeptide; note = XENP021902 7G8_H3.23_L1.11-[CTLA-4]_H3.23_L0.129 scFv-Fc Heavy Chain

SEQ ID NO: 38984 - protein, 118 aa, synthetic construct; identical to SEQ ID NO: 2632
  source 1..118: note = Description of Artificial Sequence: Synthetic polypeptide; note = VH of XENP021902

SEQ ID NO: 38985 - protein, 108 aa, synthetic construct; identical to SEQ ID NO: 2768
  source 1..108: note = Description of Artificial Sequence: Synthetic polypeptide; note = VL of XENP021902

SEQ ID NO: 38986 - protein, 231 aa, synthetic construct; identical to SEQ ID NO: 21532
  source 1..231: note = Description of Artificial Sequence: Synthetic polypeptide; note = Fc chain of XENP021902

SEQ ID NO: 38987 - protein, 5 aa, synthetic construct
  source 1..5: note = Description of Artificial Sequence: Synthetic peptide; note = XENP021902 vhCDR1
SYTMH

SEQ ID NO: 38988 - protein, 17 aa, synthetic construct
  source 1..17: note = Description of Artificial Sequence: Synthetic peptide; note = XENP021902 vhCDR2
FISYDGNYKYYADSVKG

SEQ ID NO: 38989 - protein, 9 aa, synthetic construct
  source 1..9: note = Description of Artificial Sequence: Synthetic peptide; note = XENP021902 vhCDR3
GGHLGPFDL

SEQ ID NO: 38990 - protein, 12 aa, synthetic construct
  source 1..12: note = Description of Artificial Sequence: Synthetic peptide; note = XENP021902 vlCDR1
RASQSVGSSYLA

SEQ ID NO: 38991 - protein, 7 aa, synthetic construct
  source 1..7: note = Description of Artificial Sequence: Synthetic peptide; note = XENP021902 vlCDR2
GASSRAT

SEQ ID NO: 38992 - protein, 9 aa, synthetic construct
  source 1..9: note = Description of Artificial Sequence: Synthetic peptide; note = XENP021902 vlCDR3
QQYGSSPWT

SEQ ID NO: 38993 - protein, 218 aa, synthetic construct; identical to SEQ ID NO: 22359
  source 1..218: note = Description of Artificial Sequence: Synthetic polypeptide; note = XENP021902 7G8_H3.23_L1.11-[CTLA-4]_H3.23_L0.129 Light Chain

SEQ ID NO: 38994 - protein, 111 aa, synthetic construct; identical to SEQ ID NO: 22360
  source 1..111: note = Description of Artificial Sequence: Synthetic polypeptide; note = VL of XENP021902

SEQ ID NO: 38995 - protein, 15 aa, synthetic construct
  source 1..15: note = Description of Artificial Sequence: Synthetic peptide; note = XENP021902 vlCDR1
RASQSVDYDGDSYMN

SEQ ID NO: 38996 - protein, 7 aa, synthetic construct
  source 1..7: note = Description of Artificial Sequence: Synthetic peptide; note = XENP021902 vlCDR2
AASELES

SEQ ID NO: 38997 - protein, 9 aa, synthetic construct
  source 1..9: note = Description of Artificial Sequence: Synthetic peptide; note = XENP021902 vlCDR3
QQSNEDPFT

SEQ ID NO: 38998 - protein, 450 aa, synthetic construct; identical to SEQ ID NO: 22424
  source 1..450: note = Description of Artificial Sequence: Synthetic polypeptide; note = XENP021904 7G8_H3.28_L1-[CTLA-4]_H3.23_L0.129 Fab-Fc Heavy Chain

SEQ ID NO: 38999 - protein, 121 aa, synthetic construct; identical to SEQ ID NO: 22425
  source 1..121: note = Description of Artificial Sequence: Synthetic polypeptide; note = VH of XENP021904

SEQ ID NO: 39000 - protein, 5 aa, synthetic construct
  source 1..5: note = Description of Artificial Sequence: Synthetic peptide; note = XENP021904 vhCDR1
DAWMD

SEQ ID NO: 39001 - protein, 19 aa, synthetic construct
  source 1..19: note = Description of Artificial Sequence: Synthetic peptide; note = XENP021904 vhCDR2
EISTKAYNHATYYAESVKG

SEQ ID NO: 39002 - protein, 10 aa, synthetic construct
  source 1..10: note = Description of Artificial Sequence: Synthetic peptide; note = XENP021904 vhCDR3
LATWDWYFDV

SEQ ID NO: 39003 - protein, 477 aa, synthetic construct; identical to SEQ ID NO: 21669
  source 1..477: note = Description of Artificial Sequence: Synthetic polypeptide; note = XENP021904 7G8_H3.28_L1-[CTLA-4]_H3.23_L0.129 scFv-Fc Heavy Chain

SEQ ID NO: 39004 - protein, 118 aa, synthetic construct; identical to SEQ ID NO: 2632
  source 1..118: note = Description of Artificial Sequence: Synthetic polypeptide; note = VH of XENP021904

SEQ ID NO: 39005 - protein, 108 aa, synthetic construct; identical to SEQ ID NO: 2768
  source 1..108: note = Description of Artificial Sequence: Synthetic polypeptide; note = VL of XENP021904

SEQ ID NO: 39006 - protein, 231 aa, synthetic construct; identical to SEQ ID NO: 21532
  source 1..231: note = Description of Artificial Sequence: Synthetic polypeptide; note = Fc chain of XENP021904

SEQ ID NO: 39007 - protein, 5 aa, synthetic construct
  source 1..5: note = Description of Artificial Sequence: Synthetic peptide; note = XENP021904 vhCDR1
SYTMH

SEQ ID NO: 39008 - protein, 17 aa, synthetic construct
  source 1..17: note = Description of Artificial Sequence: Synthetic peptide; note = XENP021904 vhCDR2
FISYDGNYKYYADSVKG

SEQ ID NO: 39009 - protein, 9 aa, synthetic construct
  source 1..9: note = Description of Artificial Sequence: Synthetic peptide; note = XENP021904 vhCDR3
GGHLGPFDL

SEQ ID NO: 39010 - protein, 12 aa, synthetic construct
  source 1..12: note = Description of Artificial Sequence: Synthetic peptide; note = XENP021904 vlCDR1
RASQSVGSSYLA

SEQ ID NO: 39011 - protein, 7 aa, synthetic construct
  source 1..7: note = Description of Artificial Sequence: Synthetic peptide; note = XENP021904 vlCDR2
GASSRAT

SEQ ID NO: 39012 - protein, 9 aa, synthetic construct
  source 1..9: note = Description of Artificial Sequence: Synthetic peptide; note = XENP021904 vlCDR3
QQYGSSPWT

SEQ ID NO: 39013 - protein, 218 aa, synthetic construct; identical to SEQ ID NO: 17600
  source 1..218: note = Description of Artificial Sequence: Synthetic polypeptide; note = XENP021904 7G8_H3.28_L1-[CTLA-4]_H3.23_L0.129 Light Chain

SEQ ID NO: 39014 - protein, 111 aa, synthetic construct; identical to SEQ ID NO: 17601
  source 1..111: note = Description of Artificial Sequence: Synthetic polypeptide; note = VL of XENP021904

SEQ ID NO: 39015 - protein, 15 aa, synthetic construct
  source 1..15: note = Description of Artificial Sequence: Synthetic peptide; note = XENP021904 vlCDR1
RASQSVDYDGDSYMN

SEQ ID NO: 39016 - protein, 7 aa, synthetic construct
  source 1..7: note = Description of Artificial Sequence: Synthetic peptide; note = XENP021904 vlCDR2
AASNLES

SEQ ID NO: 39017 - protein, 9 aa, synthetic construct
  source 1..9: note = Description of Artificial Sequence: Synthetic peptide; note = XENP021904 vlCDR3
QQSNEDPFT

SEQ ID NO: 39018 - protein, 450 aa, synthetic construct; identical to SEQ ID NO: 22424
  source 1..450: note = Description of Artificial Sequence: Synthetic polypeptide; note = XENP021905 7G8_H3.28_L1.11-[CTLA-4]_H3.23_L0.129 Fab-Fc Heavy Chain

SEQ ID NO: 39019 - protein, 121 aa, synthetic construct; identical to SEQ ID NO: 22425
  source 1..121: note = Description of Artificial Sequence: Synthetic polypeptide; note = VH of XENP021905

SEQ ID NO: 39020 - protein, 5 aa, synthetic construct
  source 1..5: note = Description of Artificial Sequence: Synthetic peptide; note = XENP021905 vhCDR1
DAWMD

SEQ ID NO: 39021 - protein, 19 aa, synthetic construct
  source 1..19: note = Description of Artificial Sequence: Synthetic peptide; note = XENP021905 vhCDR2
EISTKAYNHATYYAESVKG

SEQ ID NO: 39022 - protein, 10 aa, synthetic construct
  source 1..10: note = Description of Artificial Sequence: Synthetic peptide; note = XENP021905 vhCDR3
LATWDWYFDV

SEQ ID NO: 39023 - protein, 477 aa, synthetic construct; identical to SEQ ID NO: 21669
  source 1..477: note = Description of Artificial Sequence: Synthetic polypeptide; note = XENP021905 7G8_H3.28_L1.11-[CTLA-4]_H3.23_L0.129 scFv-Fc Heavy Chain

SEQ ID NO: 39024 - protein, 118 aa, synthetic construct; identical to SEQ ID NO: 2632
  source 1..118: note = Description of Artificial Sequence: Synthetic polypeptide; note = VH of XENP021905

SEQ ID NO: 39025 - protein, 108 aa, synthetic construct; identical to SEQ ID NO: 2768
  source 1..108: note = Description of Artificial Sequence: Synthetic polypeptide; note = VL of XENP021905

SEQ ID NO: 39026 - protein, 231 aa, synthetic construct; identical to SEQ ID NO: 21532
  source 1..231: note = Description of Artificial Sequence: Synthetic polypeptide; note = Fc chain of XENP021905

SEQ ID NO: 39027 - protein, 5 aa, synthetic construct
  source 1..5: note = Description of Artificial Sequence: Synthetic peptide; note = XENP021905 vhCDR1
SYTMH

SEQ ID NO: 39028 - protein, 17 aa, synthetic construct
  source 1..17: note = Description of Artificial Sequence: Synthetic peptide; note = XENP021905 vhCDR2
FISYDGNYKYYADSVKG

SEQ ID NO: 39029 - protein, 9 aa, synthetic construct
  source 1..9: note = Description of Artificial Sequence: Synthetic peptide; note = XENP021905 vhCDR3
GGHLGPFDL

SEQ ID NO: 39030 - protein, 12 aa, synthetic construct
  source 1..12: note = Description of Artificial Sequence: Synthetic peptide; note = XENP021905 vlCDR1
RASQSVGSSYLA

SEQ ID NO: 39031 - protein, 7 aa, synthetic construct
  source 1..7: note = Description of Artificial Sequence: Synthetic peptide; note = XENP021905 vlCDR2
GASSRAT

SEQ ID NO: 39032 - protein, 9 aa, synthetic construct
  source 1..9: note = Description of Artificial Sequence: Synthetic peptide; note = XENP021905 vlCDR3
QQYGSSPWT

SEQ ID NO: 39033 - protein, 218 aa, synthetic construct; identical to SEQ ID NO: 22359
  source 1..218: note = Description of Artificial Sequence: Synthetic polypeptide; note = XENP021905 7G8_H3.28_L1.11-[CTLA-4]_H3.23_L0.129 Light Chain

SEQ ID NO: 39034 - protein, 111 aa, synthetic construct; identical to SEQ ID NO: 22360
  source 1..111: note = Description of Artificial Sequence: Synthetic polypeptide; note = VL of XENP021905

SEQ ID NO: 39035 - protein, 15 aa, synthetic construct
  source 1..15: note = Description of Artificial Sequence: Synthetic peptide; note = XENP021905 vlCDR1
RASQSVDYDGDSYMN

SEQ ID NO: 39036 - protein, 7 aa, synthetic construct
  source 1..7: note = Description of Artificial Sequence: Synthetic peptide; note = XENP021905 vlCDR2
AASELES

SEQ ID NO: 39037 - protein, 9 aa, synthetic construct
  source 1..9: note = Description of Artificial Sequence: Synthetic peptide; note = XENP021905 vlCDR3
QQSNEDPFT

SEQ ID NO: 39038 - protein, 450 aa, synthetic construct; identical to SEQ ID NO: 22424
  source 1..450: note = Description of Artificial Sequence: Synthetic polypeptide; note = XENP021906 7G8_H3.28_L1.13-[CTLA-4]_H3.23_L0.129 Fab-Fc Heavy Chain

SEQ ID NO: 39039 - protein, 121 aa, synthetic construct; identical to SEQ ID NO: 22425
  source 1..121: note = Description of Artificial Sequence: Synthetic polypeptide; note = VH of XENP021906

SEQ ID NO: 39040 - protein, 5 aa, synthetic construct
  source 1..5: note = Description of Artificial Sequence: Synthetic peptide; note = XENP021906 vhCDR1
DAWMD

SEQ ID NO: 39041 - protein, 19 aa, synthetic construct
  source 1..19: note = Description of Artificial Sequence: Synthetic peptide; note = XENP021906 vhCDR2
EISTKAYNHATYYAESVKG

SEQ ID NO: 39042 - protein, 10 aa, synthetic construct
  source 1..10: note = Description of Artificial Sequence: Synthetic peptide; note = XENP021906 vhCDR3
LATWDWYFDV

SEQ ID NO: 39043 - protein, 477 aa, synthetic construct; identical to SEQ ID NO: 21669
  source 1..477: note = Description of Artificial Sequence: Synthetic polypeptide; note = XENP021906 7G8_H3.28_L1.13-[CTLA-4]_H3.23_L0.129 scFv-Fc Heavy Chain

SEQ ID NO: 39044 - protein, 118 aa, synthetic construct; identical to SEQ ID NO: 2632
  source 1..118: note = Description of Artificial Sequence: Synthetic polypeptide; note = VH of XENP021906

SEQ ID NO: 39045 - protein, 108 aa, synthetic construct; identical to SEQ ID NO: 2768
  source 1..108: note = Description of Artificial Sequence: Synthetic polypeptide; note = VL of XENP021906

SEQ ID NO: 39046 - protein, 231 aa, synthetic construct; identical to SEQ ID NO: 21532
  source 1..231: note = Description of Artificial Sequence: Synthetic polypeptide; note = Fc chain of XENP021906

SEQ ID NO: 39047 - protein, 5 aa, synthetic construct
  source 1..5: note = Description of Artificial Sequence: Synthetic peptide; note = XENP021906 vhCDR1
SYTMH

SEQ ID NO: 39048 - protein, 17 aa, synthetic construct
  source 1..17: note = Description of Artificial Sequence: Synthetic peptide; note = XENP021906 vhCDR2
FISYDGNYKYYADSVKG

SEQ ID NO: 39049 - protein, 9 aa, synthetic construct
  source 1..9: note = Description of Artificial Sequence: Synthetic peptide; note = XENP021906 vhCDR3
GGHLGPFDL

SEQ ID NO: 39050 - protein, 12 aa, synthetic construct
  source 1..12: note = Description of Artificial Sequence: Synthetic peptide; note = XENP021906 vlCDR1
RASQSVGSSYLA

SEQ ID NO: 39051 - protein, 7 aa, synthetic construct
  source 1..7: note = Description of Artificial Sequence: Synthetic peptide; note = XENP021906 vlCDR2
GASSRAT

SEQ ID NO: 39052 - protein, 9 aa, synthetic construct
  source 1..9: note = Description of Artificial Sequence: Synthetic peptide; note = XENP021906 vlCDR3
QQYGSSPWT

SEQ ID NO: 39053 - protein, 218 aa, synthetic construct; identical to SEQ ID NO: 22419
  source 1..218: note = Description of Artificial Sequence: Synthetic polypeptide; note = XENP021906 7G8_H3.28_L1.13-[CTLA-4]_H3.23_L0.129 Light Chain

SEQ ID NO: 39054 - protein, 111 aa, synthetic construct; identical to SEQ ID NO: 22420
  source 1..111: note = Description of Artificial Sequence: Synthetic polypeptide; note = VL of XENP021906

SEQ ID NO: 39055 - protein, 15 aa, synthetic construct
  source 1..15: note = Description of Artificial Sequence: Synthetic peptide; note = XENP021906 vlCDR1
RASQSVDHDGDSYMN

SEQ ID NO: 39056 - protein, 7 aa, synthetic construct
  source 1..7: note = Description of Artificial Sequence: Synthetic peptide; note = XENP021906 vlCDR2
AASELES

SEQ ID NO: 39057 - protein, 9 aa, synthetic construct
  source 1..9: note = Description of Artificial Sequence: Synthetic peptide; note = XENP021906 vlCDR3
QQSNEDPFT

SEQ ID NO: 39058 - protein, 447 aa, synthetic construct; identical to SEQ ID NO: 22064
  source 1..447: note = Description of Artificial Sequence: Synthetic polypeptide; note = XENP022505 2A11_H1.125_L2.113_Fab-[CTLA-4]_H3.23_L0.129 Fab-Fc Heavy Chain

SEQ ID NO: 39059 - protein, 118 aa, synthetic construct; identical to SEQ ID NO: 22065
  source 1..118: note = Description of Artificial Sequence: Synthetic polypeptide; note = VH of XENP022505

SEQ ID NO: 39060 - protein, 5 aa, synthetic construct
  source 1..5: note = Description of Artificial Sequence: Synthetic peptide; note = XENP022505 vhCDR1
HYFMH

SEQ ID NO: 39061 - protein, 17 aa, synthetic construct
  source 1..17: note = Description of Artificial Sequence: Synthetic peptide; note = XENP022505 vhCDR2
WIDPYLGDTEYAPKFQG

SEQ ID NO: 39062 - protein, 9 aa, synthetic construct
  source 1..9: note = Description of Artificial Sequence: Synthetic peptide; note = XENP022505 vhCDR3
RGVYQALDY

SEQ ID NO: 39063 - protein, 477 aa, synthetic construct; identical to SEQ ID NO: 21669
  source 1..477: note = Description of Artificial Sequence: Synthetic polypeptide; note = XENP022505 2A11_H1.125_L2.113_Fab-[CTLA-4]_H3.23_L0.129 scFv-Fc Heavy Chain

SEQ ID NO: 39064 - protein, 118 aa, synthetic construct; identical to SEQ ID NO: 2632
  source 1..118: note = Description of Artificial Sequence: Synthetic polypeptide; note = VH of XENP022505

SEQ ID NO: 39065 - protein, 108 aa, synthetic construct; identical to SEQ ID NO: 2768
  source 1..108: note = Description of Artificial Sequence: Synthetic polypeptide; note = VL of XENP022505

SEQ ID NO: 39066 - protein, 231 aa, synthetic construct; identical to SEQ ID NO: 21532
  source 1..231: note = Description of Artificial Sequence: Synthetic polypeptide; note = Fc chain of XENP022505

SEQ ID NO: 39067 - protein, 5 aa, synthetic construct
  source 1..5: note = Description of Artificial Sequence: Synthetic peptide; note = XENP022505 vhCDR1
SYTMH

SEQ ID NO: 39068 - protein, 17 aa, synthetic construct
  source 1..17: note = Description of Artificial Sequence: Synthetic peptide; note = XENP022505 vhCDR2
FISYDGNYKYYADSVKG

SEQ ID NO: 39069 - protein, 9 aa, synthetic construct
  source 1..9: note = Description of Artificial Sequence: Synthetic peptide; note = XENP022505 vhCDR3
GGHLGPFDL

SEQ ID NO: 39070 - protein, 12 aa, synthetic construct
  source 1..12: note = Description of Artificial Sequence: Synthetic peptide; note = XENP022505 vlCDR1
RASQSVGSSYLA

SEQ ID NO: 39071 - protein, 7 aa, synthetic construct
  source 1..7: note = Description of Artificial Sequence: Synthetic peptide; note = XENP022505 vlCDR2
GASSRAT

SEQ ID NO: 39072 - protein, 9 aa, synthetic construct
  source 1..9: note = Description of Artificial Sequence: Synthetic peptide; note = XENP022505 vlCDR3
QQYGSSPWT

SEQ ID NO: 39073 - protein, 214 aa, synthetic construct; identical to SEQ ID NO: 22079
  source 1..214: note = Description of Artificial Sequence: Synthetic polypeptide; note = XENP022505 2A11_H1.125_L2.113_Fab-[CTLA-4]_H3.23_L0.129 Light Chain

SEQ ID NO: 39074 - protein, 107 aa, synthetic construct; identical to SEQ ID NO: 22080
  source 1..107: note = Description of Artificial Sequence: Synthetic polypeptide; note = VL of XENP022505

SEQ ID NO: 39075 - protein, 11 aa, synthetic construct
  source 1..11: note = Description of Artificial Sequence: Synthetic peptide; note = XENP022505 vlCDR1
QASQDIGNYLN

SEQ ID NO: 39076 - protein, 7 aa, synthetic construct
  source 1..7: note = Description of Artificial Sequence: Synthetic peptide; note = XENP022505 vlCDR2
FTSYLHS

SEQ ID NO: 39077 - protein, 9 aa, synthetic construct
  source 1..9: note = Description of Artificial Sequence: Synthetic peptide; note = XENP022505 vlCDR3
QQGNTLPYT

SEQ ID NO: 39078 - protein, 447 aa, synthetic construct; identical to SEQ ID NO: 17235
  source 1..447: note = Description of Artificial Sequence: Synthetic polypeptide; note = XENP022510 2A11_H1_L2.25_Fab-[CTLA-4]_H3.23_L0.129 Fab-Fc Heavy Chain

SEQ ID NO: 39079 - protein, 118 aa, synthetic construct; identical to SEQ ID NO: 17236
  source 1..118: note = Description of Artificial Sequence: Synthetic polypeptide; note = VH of XENP022510

SEQ ID NO: 39080 - protein, 5 aa, synthetic construct
  source 1..5: note = Description of Artificial Sequence: Synthetic peptide; note = XENP022510 vhCDR1
DYYMH

SEQ ID NO: 39081 - protein, 17 aa, synthetic construct
  source 1..17: note = Description of Artificial Sequence: Synthetic peptide; note = XENP022510 vhCDR2
WIDPENGDTEYAPKFQG

SEQ ID NO: 39082 - protein, 9 aa, synthetic construct
  source 1..9: note = Description of Artificial Sequence: Synthetic peptide; note = XENP022510 vhCDR3
RGVRQALDY

SEQ ID NO: 39083 - protein, 477 aa, synthetic construct; identical to SEQ ID NO: 21669
  source 1..477: note = Description of Artificial Sequence: Synthetic polypeptide; note = XENP022510 2A11_H1_L2.25_Fab-[CTLA-4]_H3.23_L0.129 scFv-Fc Heavy Chain

SEQ ID NO: 39084 - protein, 118 aa, synthetic construct; identical to SEQ ID NO: 2632
  source 1..118: note = Description of Artificial Sequence: Synthetic polypeptide; note = VH of XENP022510

SEQ ID NO: 39085 - protein, 108 aa, synthetic construct; identical to SEQ ID NO: 2768
  source 1..108: note = Description of Artificial Sequence: Synthetic polypeptide; note = VL of XENP022510

SEQ ID NO: 39086 - protein, 231 aa, synthetic construct; identical to SEQ ID NO: 21532
  source 1..231: note = Description of Artificial Sequence: Synthetic polypeptide; note = Fc chain of XENP022510

SEQ ID NO: 39087 - protein, 5 aa, synthetic construct
  source 1..5: note = Description of Artificial Sequence: Synthetic peptide; note = XENP022510 vhCDR1
SYTMH

SEQ ID NO: 39088 - protein, 17 aa, synthetic construct
  source 1..17: note = Description of Artificial Sequence: Synthetic peptide; note = XENP022510 vhCDR2
FISYDGNYKYYADSVKG

SEQ ID NO: 39089 - protein, 9 aa, synthetic construct
  source 1..9: note = Description of Artificial Sequence: Synthetic peptide; note = XENP022510 vhCDR3
GGHLGPFDL

SEQ ID NO: 39090 - protein, 12 aa, synthetic construct
  source 1..12: note = Description of Artificial Sequence: Synthetic peptide; note = XENP022510 vlCDR1
RASQSVGSSYLA

SEQ ID NO: 39091 - protein, 7 aa, synthetic construct
  source 1..7: note = Description of Artificial Sequence: Synthetic peptide; note = XENP022510 vlCDR2
GASSRAT

SEQ ID NO: 39092 - protein, 9 aa, synthetic construct
  source 1..9: note = Description of Artificial Sequence: Synthetic peptide; note = XENP022510 vlCDR3
QQYGSSPWT

SEQ ID NO: 39093 - protein, 214 aa, synthetic construct; identical to SEQ ID NO: 22179
  source 1..214: note = Description of Artificial Sequence: Synthetic polypeptide; note = XENP022510 2A11_H1_L2.25_Fab-[CTLA-4]_H3.23_L0.129 Light Chain

SEQ ID NO: 39094 - protein, 107 aa, synthetic construct; identical to SEQ ID NO: 22180
  source 1..107: note = Description of Artificial Sequence: Synthetic polypeptide; note = VL of XENP022510

SEQ ID NO: 39095 - protein, 11 aa, synthetic construct
  source 1..11: note = Description of Artificial Sequence: Synthetic peptide; note = XENP022510 vlCDR1
QASQDIGNHLN

SEQ ID NO: 39096 - protein, 7 aa, synthetic construct
  source 1..7: note = Description of Artificial Sequence: Synthetic peptide; note = XENP022510 vlCDR2
YTSRLHS

SEQ ID NO: 39097 - protein, 9 aa, synthetic construct
  source 1..9: note = Description of Artificial Sequence: Synthetic peptide; note = XENP022510 vlCDR3
QQGNTLPYT

SEQ ID NO: 39098 - protein, 450 aa, synthetic construct; identical to SEQ ID NO: 22484
  source 1..450: note = Description of Artificial Sequence: Synthetic polypeptide; note = XENP022602 7G8_H3.30_L1.34-[CTLA-4]_H3.23_L0.129 Fab-Fc Heavy Chain

SEQ ID NO: 39099 - protein, 121 aa, synthetic construct; identical to SEQ ID NO: 22485
  source 1..121: note = Description of Artificial Sequence: Synthetic polypeptide; note = VH of XENP022602

SEQ ID NO: 39100 - protein, 5 aa, synthetic construct
  source 1..5: note = Description of Artificial Sequence: Synthetic peptide; note = XENP022602 vhCDR1
DAWMS

SEQ ID NO: 39101 - protein, 19 aa, synthetic construct
  source 1..19: note = Description of Artificial Sequence: Synthetic peptide; note = XENP022602 vhCDR2
EISTKANNHATYYAESVKG

SEQ ID NO: 39102 - protein, 10 aa, synthetic construct
  source 1..10: note = Description of Artificial Sequence: Synthetic peptide; note = XENP022602 vhCDR3
LATWDWYFDV

SEQ ID NO: 39103 - protein, 477 aa, synthetic construct; identical to SEQ ID NO: 21669
  source 1..477: note = Description of Artificial Sequence: Synthetic polypeptide; note = XENP022602 7G8_H3.30_L1.34-[CTLA-4]_H3.23_L0.129 scFv-Fc Heavy Chain

SEQ ID NO: 39104 - protein, 118 aa, synthetic construct; identical to SEQ ID NO: 2632
  source 1..118: note = Description of Artificial Sequence: Synthetic polypeptide; note = VH of XENP022602

SEQ ID NO: 39105 - protein, 108 aa, synthetic construct; identical to SEQ ID NO: 2768
  source 1..108: note = Description of Artificial Sequence: Synthetic polypeptide; note = VL of XENP022602

SEQ ID NO: 39106 - protein, 231 aa, synthetic construct; identical to SEQ ID NO: 21532
  source 1..231: note = Description of Artificial Sequence: Synthetic polypeptide; note = Fc chain of XENP022602

SEQ ID NO: 39107 - protein, 5 aa, synthetic construct
  source 1..5: note = Description of Artificial Sequence: Synthetic peptide; note = XENP022602 vhCDR1
SYTMH

SEQ ID NO: 39108 - protein, 17 aa, synthetic construct
  source 1..17: note = Description of Artificial Sequence: Synthetic peptide; note = XENP022602 vhCDR2
FISYDGNYKYYADSVKG

SEQ ID NO: 39109 - protein, 9 aa, synthetic construct
  source 1..9: note = Description of Artificial Sequence: Synthetic peptide; note = XENP022602 vhCDR3
GGHLGPFDL

SEQ ID NO: 39110 - protein, 12 aa, synthetic construct
  source 1..12: note = Description of Artificial Sequence: Synthetic peptide; note = XENP022602 vlCDR1
RASQSVGSSYLA

SEQ ID NO: 39111 - protein, 7 aa, synthetic construct
  source 1..7: note = Description of Artificial Sequence: Synthetic peptide; note = XENP022602 vlCDR2
GASSRAT

SEQ ID NO: 39112 - protein, 9 aa, synthetic construct
  source 1..9: note = Description of Artificial Sequence: Synthetic peptide; note = XENP022602 vlCDR3
QQYGSSPWT

SEQ ID NO: 39113 - protein, 218 aa, synthetic construct; identical to SEQ ID NO: 22599
  source 1..218: note = Description of Artificial Sequence: Synthetic polypeptide; note = XENP022602 7G8_H3.30_L1.34-[CTLA-4]_H3.23_L0.129 Light Chain

SEQ ID NO: 39114 - protein, 111 aa, synthetic construct; identical to SEQ ID NO: 22600
  source 1..111: note = Description of Artificial Sequence: Synthetic polypeptide; note = VL of XENP022602

SEQ ID NO: 39115 - protein, 15 aa, synthetic construct
  source 1..15: note = Description of Artificial Sequence: Synthetic peptide; note = XENP022602 vlCDR1
RASQSVDYDGDSYMN

SEQ ID NO: 39116 - protein, 7 aa, synthetic construct
  source 1..7: note = Description of Artificial Sequence: Synthetic peptide; note = XENP022602 vlCDR2
AASELES

SEQ ID NO: 39117 - protein, 9 aa, synthetic construct
  source 1..9: note = Description of Artificial Sequence: Synthetic peptide; note = XENP022602 vlCDR3
QQSNEDPFT

SEQ ID NO: 39118 - protein, 447 aa, synthetic construct; identical to SEQ ID NO: 22084
  source 1..447: note = Description of Artificial Sequence: Synthetic polypeptide; note = XENP022675 2A11_H1.144_L2.142_Fab-[CTLA-4]_H3.23_L0.129 Fab-Fc Heavy Chain

SEQ ID NO: 39119 - protein, 118 aa, synthetic construct; identical to SEQ ID NO: 22085
  source 1..118: note = Description of Artificial Sequence: Synthetic polypeptide; note = VH of XENP022675

SEQ ID NO: 39120 - protein, 5 aa, synthetic construct
  source 1..5: note = Description of Artificial Sequence: Synthetic peptide; note = XENP022675 vhCDR1
DYFMH

SEQ ID NO: 39121 - protein, 17 aa, synthetic construct
  source 1..17: note = Description of Artificial Sequence: Synthetic peptide; note = XENP022675 vhCDR2
WIDPELGDTEYAPKFQG

SEQ ID NO: 39122 - protein, 9 aa, synthetic construct
  source 1..9: note = Description of Artificial Sequence: Synthetic peptide; note = XENP022675 vhCDR3
RGVYQALDY

SEQ ID NO: 39123 - protein, 477 aa, synthetic construct; identical to SEQ ID NO: 21669
  source 1..477: note = Description of Artificial Sequence: Synthetic polypeptide; note = XENP022675 2A11_H1.144_L2.142_Fab-[CTLA-4]_H3.23_L0.129 scFv-Fc Heavy Chain

SEQ ID NO: 39124 - protein, 118 aa, synthetic construct; identical to SEQ ID NO: 2632
  source 1..118: note = Description of Artificial Sequence: Synthetic polypeptide; note = VH of XENP022675

SEQ ID NO: 39125 - protein, 108 aa, synthetic construct; identical to SEQ ID NO: 2768
  source 1..108: note = Description of Artificial Sequence: Synthetic polypeptide; note = VL of XENP022675

SEQ ID NO: 39126 - protein, 231 aa, synthetic construct; identical to SEQ ID NO: 21532
  source 1..231: note = Description of Artificial Sequence: Synthetic polypeptide; note = Fc chain of XENP022675

SEQ ID NO: 39127 - protein, 5 aa, synthetic construct
  source 1..5: note = Description of Artificial Sequence: Synthetic peptide; note = XENP022675 vhCDR1
SYTMH

SEQ ID NO: 39128 - protein, 17 aa, synthetic construct
  source 1..17: note = Description of Artificial Sequence: Synthetic peptide; note = XENP022675 vhCDR2
FISYDGNYKYYADSVKG

SEQ ID NO: 39129 - protein, 9 aa, synthetic construct
  source 1..9: note = Description of Artificial Sequence: Synthetic peptide; note = XENP022675 vhCDR3
GGHLGPFDL

SEQ ID NO: 39130 - protein, 12 aa, synthetic construct
  source 1..12: note = Description of Artificial Sequence: Synthetic peptide; note = XENP022675 vlCDR1
RASQSVGSSYLA

SEQ ID NO: 39131 - protein, 7 aa, synthetic construct
  source 1..7: note = Description of Artificial Sequence: Synthetic peptide; note = XENP022675 vlCDR2
GASSRAT

SEQ ID NO: 39132 - protein, 9 aa, synthetic construct
  source 1..9: note = Description of Artificial Sequence: Synthetic peptide; note = XENP022675 vlCDR3
QQYGSSPWT

SEQ ID NO: 39133 - protein, 214 aa, synthetic construct; identical to SEQ ID NO: 22279
  source 1..214: note = Description of Artificial Sequence: Synthetic polypeptide; note = XENP022675 2A11_H1.144_L2.142_Fab-[CTLA-4]_H3.23_L0.129 Light Chain

SEQ ID NO: 39134 - protein, 107 aa, synthetic construct; identical to SEQ ID NO: 22280
  source 1..107: note = Description of Artificial Sequence: Synthetic polypeptide; note = VL of XENP022675

SEQ ID NO: 39135 - protein, 11 aa, synthetic construct
  source 1..11: note = Description of Artificial Sequence: Synthetic peptide; note = XENP022675 vlCDR1
QASQDIGNYLN

SEQ ID NO: 39136 - protein, 7 aa, synthetic construct
  source 1..7: note = Description of Artificial Sequence: Synthetic peptide; note = XENP022675 vlCDR2
FTSYLHS

SEQ ID NO: 39137 - protein, 9 aa, synthetic construct
  source 1..9: note = Description of Artificial Sequence: Synthetic peptide; note = XENP022675 vlCDR3
QQGNTLPYT

SEQ ID NO: 39138 - protein, 450 aa, synthetic construct; identical to SEQ ID NO: 35607
  source 1..450: note = Description of Artificial Sequence: Synthetic polypeptide; note = XENP022841 7G8_H3.30_L1.34_Fab-[CTLA-4]_H3.23_L0.129_scFv  M428L/N434S Fab-Fc Heavy Chain

SEQ ID NO: 39139 - protein, 121 aa, synthetic construct; identical to SEQ ID NO: 22485
  source 1..121: note = Description of Artificial Sequence: Synthetic polypeptide; note = VH of XENP022841

SEQ ID NO: 39140 - protein, 5 aa, synthetic construct
  source 1..5: note = Description of Artificial Sequence: Synthetic peptide; note = XENP022841 vhCDR1
DAWMS

SEQ ID NO: 39141 - protein, 19 aa, synthetic construct
  source 1..19: note = Description of Artificial Sequence: Synthetic peptide; note = XENP022841 vhCDR2
EISTKANNHATYYAESVKG

SEQ ID NO: 39142 - protein, 10 aa, synthetic construct
  source 1..10: note = Description of Artificial Sequence: Synthetic peptide; note = XENP022841 vhCDR3
LATWDWYFDV

SEQ ID NO: 39143 - protein, 477 aa, synthetic construct; identical to SEQ ID NO: 35612
  source 1..477: note = Description of Artificial Sequence: Synthetic polypeptide; note = XENP022841 7G8_H3.30_L1.34_Fab-[CTLA-4]_H3.23_L0.129_scFv M428L/N434S scFv-Fc Heavy Chain

SEQ ID NO: 39144 - protein, 118 aa, synthetic construct; identical to SEQ ID NO: 2632
  source 1..118: note = Description of Artificial Sequence: Synthetic polypeptide; note = VH of XENP022841

SEQ ID NO: 39145 - protein, 108 aa, synthetic construct; identical to SEQ ID NO: 2768
  source 1..108: note = Description of Artificial Sequence: Synthetic polypeptide; note = VL of XENP022841

SEQ ID NO: 39146 - protein, 231 aa, synthetic construct; identical to SEQ ID NO: 21572
  source 1..231: note = Description of Artificial Sequence: Synthetic polypeptide; note = Fc chain of XENP022841

SEQ ID NO: 39147 - protein, 5 aa, synthetic construct
  source 1..5: note = Description of Artificial Sequence: Synthetic peptide; note = XENP022841 vhCDR1
SYTMH

SEQ ID NO: 39148 - protein, 17 aa, synthetic construct
  source 1..17: note = Description of Artificial Sequence: Synthetic peptide; note = XENP022841 vhCDR2
FISYDGNYKYYADSVKG

SEQ ID NO: 39149 - protein, 9 aa, synthetic construct
  source 1..9: note = Description of Artificial Sequence: Synthetic peptide; note = XENP022841 vhCDR3
GGHLGPFDL

SEQ ID NO: 39150 - protein, 12 aa, synthetic construct
  source 1..12: note = Description of Artificial Sequence: Synthetic peptide; note = XENP022841 vlCDR1
RASQSVGSSYLA

SEQ ID NO: 39151 - protein, 7 aa, synthetic construct
  source 1..7: note = Description of Artificial Sequence: Synthetic peptide; note = XENP022841 vlCDR2
GASSRAT

SEQ ID NO: 39152 - protein, 9 aa, synthetic construct
  source 1..9: note = Description of Artificial Sequence: Synthetic peptide; note = XENP022841 vlCDR3
QQYGSSPWT

SEQ ID NO: 39153 - protein, 218 aa, synthetic construct; identical to SEQ ID NO: 22599
  source 1..218: note = Description of Artificial Sequence: Synthetic polypeptide; note = XENP022841 7G8_H3.30_L1.34_Fab-[CTLA-4]_H3.23_L0.129_scFv M428L/N434S Light Chain

SEQ ID NO: 39154 - protein, 111 aa, synthetic construct; identical to SEQ ID NO: 22600
  source 1..111: note = Description of Artificial Sequence: Synthetic polypeptide; note = VL of XENP022841

SEQ ID NO: 39155 - protein, 15 aa, synthetic construct
  source 1..15: note = Description of Artificial Sequence: Synthetic peptide; note = XENP022841 vlCDR1
RASQSVDYDGDSYMN

SEQ ID NO: 39156 - protein, 7 aa, synthetic construct
  source 1..7: note = Description of Artificial Sequence: Synthetic peptide; note = XENP022841 vlCDR2
AASELES

SEQ ID NO: 39157 - protein, 9 aa, synthetic construct
  source 1..9: note = Description of Artificial Sequence: Synthetic peptide; note = XENP022841 vlCDR3
QQSNEDPFT

SEQ ID NO: 39158 - protein, 329 aa, synthetic construct
  source 1..329: note = Description of Artificial Sequence: Synthetic polypeptide
ASTKGPSVFPLAPSSKSTSGGTAALGCLVKDYFPEPVTVSWNSGALTSGVHTFPAVLQSSGLYSLSSVVTVPSSSLGTQTYICNVNHKPSDTKVDKKVEPKSCDKTHTCPPCPAPPVAGPSVFLFPPKPKDTLMISRTPEVTCVVVDVKHEDPEVKFNWYVDGVEVHNAKTKPREEEYNSTYRVVSVLTVLHQDWLNGKEYKCKVSNKALPAPIEKTISKAKGQPREPQVYTLPPSRDELTKNQVSLTCDVSGFYPSDIAVEWESDGQPENNYKTTPPVLDSDGSFFLYSKLTVDKSRWEQGDVFSCSVMHEALHNHYTQKSLSLSPGK

SEQ ID NO: 39159 - protein, 231 aa, synthetic construct
  source 1..231: note = Description of Artificial Sequence: Synthetic polypeptide
EPKSSDKTHTCPPCPAPPVAGPSVFLFPPKPKDTLMISRTPEVTCVVVDVKHEDPEVKFNWYVDGVEVHNAKTKPREEQYASTYRVVSVLTVLHQDWLNGKEYKCKVSNKALPAPIEKTISKAKGQPREPQVYTLPPSREQMTKNQVKLTCLVKGFYPSDIAVEWESNGQPENNYKTTPPVLDSDGSFFLYSKLTVDKSRWQQGNVFSCSVMHEALHNHYTQKSLSLSPGK

SEQ ID NO: 39160 - protein, 329 aa, synthetic construct
  source 1..329: note = Description of Artificial Sequence: Synthetic polypeptide
ASTKGPSVFPLAPSSKSTSGGTAALGCLVKDYFPEPVTVSWNSGALTSGVHTFPAVLQSSGLYSLSSVVTVPSSSLGTQTYICNVNHKPSDTKVDKKVEPKSCDKTHTCPPCPAPPVAGPSVFLFPPKPKDTLMISRTPEVTCVVVDVKHEDPEVKFNWYVDGVEVHNAKTKPREEEYASTYRVVSVLTVLHQDWLNGKEYKCKVSNKALPAPIEKTISKAKGQPREPQVYTLPPSREEMTKNQVSLTCDVSGFYPSDIAVEWESDGQPENNYKTTPPVLDSDGSFFLYSKLTVDKSRWEQGDVFSCSVMHEALHNHYTQKSLSLSPGK

SEQ ID NO: 39161 - protein, 231 aa, synthetic construct; identical to SEQ ID NO: 39159
  source 1..231: note = Description of Artificial Sequence: Synthetic polypeptide

SEQ ID NO: 39162 - protein, 329 aa, synthetic construct
  source 1..329: note = Description of Artificial Sequence: Synthetic polypeptide
ASTKGPSVFPLAPSSKSTSGGTAALGCLVKDYFPEPVTVSWNSGALTSGVHTFPAVLQSSGLYSLSSVVTVPSSSLGTQTYICNVNHKPSDTKVDKKVEPKSCDKTHTCPPCPAPPVAGPSVFLFPPKPKDTLMISRTPEVTCVVVDVKHEDPEVKFNWYVDGVEVHNAKTKPREEEYSSTYRVVSVLTVLHQDWLNGKEYKCKVSNKALPAPIEKTISKAKGQPREPQVYTLPPSREEMTKNQVSLTCDVSGFYPSDIAVEWESDGQPENNYKTTPPVLDSDGSFFLYSKLTVDKSRWEQGDVFSCSVMHEALHNHYTQKSLSLSPGK

SEQ ID NO: 39163 - protein, 231 aa, synthetic construct
  source 1..231: note = Description of Artificial Sequence: Synthetic polypeptide
EPKSSDKTHTCPPCPAPPVAGPSVFLFPPKPKDTLMISRTPEVTCVVVDVKHEDPEVKFNWYVDGVEVHNAKTKPREEQYSSTYRVVSVLTVLHQDWLNGKEYKCKVSNKALPAPIEKTISKAKGQPREPQVYTLPPSREQMTKNQVKLTCLVKGFYPSDIAVEWESNGQPENNYKTTPPVLDSDGSFFLYSKLTVDKSRWQQGNVFSCSVMHEALHNHYTQKSLSLSPGK

SEQ ID NO: 39164 - protein, 327 aa, synthetic construct
  source 1..327: note = Description of Artificial Sequence: Synthetic polypeptide
ASTKGPSVFPLAPCSRSTSESTAALGCLVKDYFPEPVTVSWNSGALTSGVHTFPAVLQSSGLYSLSSVVTVPSSSLGTKTYTCNVDHKPSDTKVDKRVESKYGPPCPPCPAPEFLGGPSVFLFPPKPKDTLMISRTPEVTCVVVDVKQEDPEVQFNWYVDGVEVHNAKTKPREEEFNSTYRVVSVLTVLHQDWLNGKEYKCKVSNKGLPSSIEKTISKAKGQPREPQVYTLPPSQEEMTKNQVSLTCDVSGFYPSDIAVEWESDGQPENNYKTTPPVLDSDGSFFLYSKLTVDKSRWEEGDVFSCSVMHEALHNHYTQKSLSLSLGK

SEQ ID NO: 39165 - protein, 229 aa, synthetic construct
  source 1..229: note = Description of Artificial Sequence: Synthetic polypeptide
ESKYGPPCPPCPAPEFLGGPSVFLFPPKPKDTLMISRTPEVTCVVVDVKQEDPEVQFNWYVDGVEVHNAKTKPREEQFNSTYRVVSVLTVLHQDWLNGKEYKCKVSNKGLPSSIEKTISKAKGQPREPQVYTLPPSQEQMTKNQVKLTCLVKGFYPSDIAVEWESNGQPENNYKTTPPVLDSDGSFFLYSKLTVDKSRWQEGNVFSCSVMHEALHNHYTQKSLSLSLGK

SEQ ID NO: 39166 - protein, 326 aa, synthetic construct
  source 1..326: note = Description of Artificial Sequence: Synthetic polypeptide
ASTKGPSVFPLAPCSRSTSESTAALGCLVKDYFPEPVTVSWNSGALTSGVHTFPAVLQSSGLYSLSSVVTVPSSNFGTQTYTCNVDHKPSDTKVDKTVERKCCVECPPCPAPPVAGPSVFLFPPKPKDTLMISRTPEVTCVVVDVSHEDPEVQFNWYVDGVEVHNAKTKPREEEFNSTFRVVSVLTVVHQDWLNGKEYKCKVSNKGLPAPIEKTISKTKGQPREPQVYTLPPSREEMTKNQVSLTCDVSGFYPSDIAVEWESDGQPENNYKTTPPMLDSDGSFFLYSKLTVDKSRWEQGDVFSCSVMHEALHNHYTQKSLSLSPGK

SEQ ID NO: 39167 - protein, 228 aa, synthetic construct
  source 1..228: note = Description of Artificial Sequence: Synthetic polypeptide
ERKCSVECPPCPAPPVAGPSVFLFPPKPKDTLMISRTPEVTCVVVDVSHEDPEVQFNWYVDGVEVHNAKTKPREEQFNSTFRVVSVLTVVHQDWLNGKEYKCKVSNKGLPAPIEKTISKTKGQPREPQVYTLPPSREQMTKNQVKLTCLVKGFYPSDIAVEWESNGQPENNYKTTPPMLDSDGSFFLYSKLTVDKSRWQQGNVFSCSVMHEALHNHYTQKSLSLSPGK

SEQ ID NO: 39168 - protein, 326 aa, synthetic construct
  source 1..326: note = Description of Artificial Sequence: Synthetic polypeptide
ASTKGPSVFPLAPCSRSTSESTAALGCLVKDYFPEPVTVSWNSGALTSGVHTFPAVLQSSGLYSLSSVVTVPSSNFGTQTYTCNVDHKPSDTKVDKTVERKCCVECPPCPAPPVAGPSVFLFPPKPKDTLMISRTPEVTCVVVDVKHEDPEVQFNWYVDGVEVHNAKTKPREEEFNSTFRVVSVLTVVHQDWLNGKEYKCKVSNKGLPAPIEKTISKTKGQPREPQVYTLPPSREEMTKNQVSLTCDVSGFYPSDIAVEWESDGQPENNYKTTPPMLDSDGSFFLYSKLTVDKSRWEQGDVFSCSVMHEALHNHYTQKSLSLSPGK

SEQ ID NO: 39169 - protein, 228 aa, synthetic construct
  source 1..228: note = Description of Artificial Sequence: Synthetic polypeptide
ERKCSVECPPCPAPPVAGPSVFLFPPKPKDTLMISRTPEVTCVVVDVKHEDPEVQFNWYVDGVEVHNAKTKPREEQFNSTFRVVSVLTVVHQDWLNGKEYKCKVSNKGLPAPIEKTISKTKGQPREPQVYTLPPSREQMTKNQVKLTCLVKGFYPSDIAVEWESNGQPENNYKTTPPMLDSDGSFFLYSKLTVDKSRWQQGNVFSCSVMHEALHNHYTQKSLSLSPGK

SEQ ID NO: 39170 - protein, 329 aa, synthetic construct; identical to SEQ ID NO: 37725
  source 1..329: note = Description of Artificial Sequence: Synthetic polypeptide

SEQ ID NO: 39171 - protein, 329 aa, synthetic construct
  source 1..329: note = Description of Artificial Sequence: Synthetic polypeptide
ASTKGPSVFPLAPSSKSTSGGTAALGCLVKDYFPEPVTVSWNSGALTSGVHTFPAVLQSSGLYSLSSVVTVPSSSLGTQTYICNVNHKPSDTKVDKKVEPKSSDKTHTCPPCPAPPVAGPSVFLFPPKPKDTLMISRTPEVTCVVVDVKHEDPEVKFNWYVDGVEVHNAKTKPREEQYNSTYRVVSVLTVLHQDWLNGKEYKCKVSNKALPAPIEKTISKAKGQPREPQVYTLPPSRDQLTKNQVKLTCLVKGFYPSDIAVEWESNGQPENNYKTTPPVLDSDGSFFLYSKLTVDKSRWQQGNVFSCSVMHEALHNHYTQKSLSLSPGK

SEQ ID NO: 39172 - protein, 329 aa, synthetic construct; identical to SEQ ID NO: 39160
  source 1..329: note = Description of Artificial Sequence: Synthetic polypeptide

SEQ ID NO: 39173 - protein, 329 aa, synthetic construct
  source 1..329: note = Description of Artificial Sequence: Synthetic polypeptide
ASTKGPSVFPLAPSSKSTSGGTAALGCLVKDYFPEPVTVSWNSGALTSGVHTFPAVLQSSGLYSLSSVVTVPSSSLGTQTYICNVNHKPSDTKVDKKVEPKSSDKTHTCPPCPAPPVAGPSVFLFPPKPKDTLMISRTPEVTCVVVDVKHEDPEVKFNWYVDGVEVHNAKTKPREEQYASTYRVVSVLTVLHQDWLNGKEYKCKVSNKALPAPIEKTISKAKGQPREPQVYTLPPSREQMTKNQVKLTCLVKGFYPSDIAVEWESNGQPENNYKTTPPVLDSDGSFFLYSKLTVDKSRWQQGNVFSCSVMHEALHNHYTQKSLSLSPGK

SEQ ID NO: 39174 - protein, 329 aa, synthetic construct; identical to SEQ ID NO: 39162
  source 1..329: note = Description of Artificial Sequence: Synthetic polypeptide

SEQ ID NO: 39175 - protein, 329 aa, synthetic construct
  source 1..329: note = Description of Artificial Sequence: Synthetic polypeptide
ASTKGPSVFPLAPSSKSTSGGTAALGCLVKDYFPEPVTVSWNSGALTSGVHTFPAVLQSSGLYSLSSVVTVPSSSLGTQTYICNVNHKPSDTKVDKKVEPKSSDKTHTCPPCPAPPVAGPSVFLFPPKPKDTLMISRTPEVTCVVVDVKHEDPEVKFNWYVDGVEVHNAKTKPREEQYSSTYRVVSVLTVLHQDWLNGKEYKCKVSNKALPAPIEKTISKAKGQPREPQVYTLPPSREQMTKNQVKLTCLVKGFYPSDIAVEWESNGQPENNYKTTPPVLDSDGSFFLYSKLTVDKSRWQQGNVFSCSVMHEALHNHYTQKSLSLSPGK

SEQ ID NO: 39176 - protein, 327 aa, synthetic construct; identical to SEQ ID NO: 39164
  source 1..327: note = Description of Artificial Sequence: Synthetic polypeptide

SEQ ID NO: 39177 - protein, 327 aa, synthetic construct
  source 1..327: note = Description of Artificial Sequence: Synthetic polypeptide
ASTKGPSVFPLAPCSRSTSESTAALGCLVKDYFPEPVTVSWNSGALTSGVHTFPAVLQSSGLYSLSSVVTVPSSSLGTKTYTCNVDHKPSDTKVDKRVESKYGPPCPPCPAPEFLGGPSVFLFPPKPKDTLMISRTPEVTCVVVDVKQEDPEVQFNWYVDGVEVHNAKTKPREEQFNSTYRVVSVLTVLHQDWLNGKEYKCKVSNKGLPSSIEKTISKAKGQPREPQVYTLPPSQEQMTKNQVKLTCLVKGFYPSDIAVEWESNGQPENNYKTTPPVLDSDGSFFLYSKLTVDKSRWQEGNVFSCSVMHEALHNHYTQKSLSLSLGK

SEQ ID NO: 39178 - protein, 326 aa, synthetic construct; identical to SEQ ID NO: 39166
  source 1..326: note = Description of Artificial Sequence: Synthetic polypeptide

SEQ ID NO: 39179 - protein, 326 aa, synthetic construct
  source 1..326: note = Description of Artificial Sequence: Synthetic polypeptide
ASTKGPSVFPLAPCSRSTSESTAALGCLVKDYFPEPVTVSWNSGALTSGVHTFPAVLQSSGLYSLSSVVTVPSSNFGTQTYTCNVDHKPSDTKVDKTVERKCSVECPPCPAPPVAGPSVFLFPPKPKDTLMISRTPEVTCVVVDVSHEDPEVQFNWYVDGVEVHNAKTKPREEQFNSTFRVVSVLTVVHQDWLNGKEYKCKVSNKGLPAPIEKTISKTKGQPREPQVYTLPPSREQMTKNQVKLTCLVKGFYPSDIAVEWESNGQPENNYKTTPPMLDSDGSFFLYSKLTVDKSRWQQGNVFSCSVMHEALHNHYTQKSLSLSPGK

SEQ ID NO: 39180 - protein, 326 aa, synthetic construct; identical to SEQ ID NO: 39168
  source 1..326: note = Description of Artificial Sequence: Synthetic polypeptide

SEQ ID NO: 39181 - protein, 326 aa, synthetic construct
  source 1..326: note = Description of Artificial Sequence: Synthetic polypeptide
ASTKGPSVFPLAPCSRSTSESTAALGCLVKDYFPEPVTVSWNSGALTSGVHTFPAVLQSSGLYSLSSVVTVPSSNFGTQTYTCNVDHKPSDTKVDKTVERKCSVECPPCPAPPVAGPSVFLFPPKPKDTLMISRTPEVTCVVVDVKHEDPEVQFNWYVDGVEVHNAKTKPREEQFNSTFRVVSVLTVVHQDWLNGKEYKCKVSNKGLPAPIEKTISKTKGQPREPQVYTLPPSREQMTKNQVKLTCLVKGFYPSDIAVEWESNGQPENNYKTTPPMLDSDGSFFLYSKLTVDKSRWQQGNVFSCSVMHEALHNHYTQKSLSLSPGK
